(19) United States
(12) Patent Application Publication
(10) Pub. No.: US 2025/0277256 A1
(43) Pub. Date: Sep. 4, 2025

(54) NUCLEIC ACID DETECTION AND ANALYSIS SYSTEMS

(71) Applicant: The Johns Hopkins University, Baltimore, MD (US)

(72) Inventors: Taekjip Ha, Baltimore, MD (US); Yanbo Wang, Baltimore, MD (US); Wayne T. Cottle, Baltimore, MD (US)

(21) Appl. No.: 18/280,164

(22) PCT Filed: Mar. 1, 2022
(86) PCT No.: PCT/US22/18387

§ 371 Date: Sep. 1, 2023

Related U.S. Application Data
(60) Provisional application No. 63/155,286, filed on Mar. 1, 2021.

(51) Int. Cl. C12Q 1/6827; C12N 15/11; C12Q 1/34; C12Q 1/6806; C12Q 1/6816

(52) U.S. Cl. CPC C12Q 1/6827; C12N 15/11; C12Q 1/34; C12Q 1/6806; C12Q 1/6816; G01N 2333/922

(57) ABSTRACT

In one embodiment, methods for detecting a specific nucleic acid sequence in a genome are provided that may include: a) inducing a nick in genomic nucleic acid sequences by a gene editing complex; b) denaturing the genomic nucleic acid sequences by contacting the genomic nucleic acid sequences with a helicase enzyme at the nicked genomic nucleic acid sequences; c) contacting the denatured genome with a detectably labeled probe, wherein the detectably labeled probe is complementary to the specific nucleic acid sequence of interest; and, d) detecting the specific nucleic acid sequence of interest.

### CROSS-REFERENCE TO RELATED APPLICATIONS

[0001] This application is a 35 U.S.C. § 371 national phase entry of International Patent Application No. PCT/US22/18387 filed Mar. 1, 2022, which claims the benefit of priority under 35 U.S.C. 119 from U.S. provisional application No. 63/155,286, filed Mar. 1, 2021 the disclosures of which are incorporated herein by reference in their entireties.

### STATEMENT AS TO RIGHTS TO INVENTIONS MADE UNDER FEDERALLY SPONSORED RESEARCH AND DEVELOPMENT

[0002] This invention was made with government support under grant GM122569 awarded by the National Institutes of Health and PHY1430124 awarded by the National Science Foundation. The government has certain rights in the invention.

### INCORPORATION BY REFERENCE OF SEQUENCE LISTING

[0003] The contents of the sequence listing text file named “048317-627001WO_SL_123767101_1.txt”, which was created on Mar. 31, 2022 and is 1,912,832 bytes in size, are incorporated herein by reference in its entirety.

### BACKGROUND

[0004] New systems for detection and analysis of nucleic acid sequence are sought. Among others, understanding of the relationship between chromosome arrangement and gene expression is limited.

### SUMMARY

[0005] In one embodiment, we now provide new methods for detecting a specific nucleic acid sequence in a genome.

[0006] Preferred methods may include:
[0007] (a) inducing a nick in genomic nucleic acid sequences by a gene editing complex;
[0008] (b) denaturing the genomic nucleic acid sequences by contacting the genomic nucleic acid sequences with a helicase enzyme at the nicked genomic nucleic acid sequences;
[0009] (c) contacting the denatured genome with a detectably labeled probe, wherein the detectably labeled probe is complementary to the specific nucleic acid sequence of interest; and,
[0010] (d) detecting the specific nucleic acid sequence of interest.

[0011] In certain aspects, the specific nucleic acid sequence of interest comprises one or more nucleic acid sequences in coding and non-coding nucleic acid sequences of the genome. Suitably, genomic nucleic acid sequences comprise genomic DNA.

[0012] In certain aspects, the nicking of genomic DNA sequences by the gene editing complex produces a 3′ single-stranded nucleic acid overhang. In certain aspects, the helicase binds to the genomic DNA at the site of the nick and unwinds downstream double stranded genomic DNA.

[0013] In certain aspects, the gene editing complex comprises a Clustered Regularly Interspaced Short Palindromic Repeat (CRISPR)-associated endonuclease and at least one guide nucleic acid sequence.

[0014] In certain aspects, the gene editing complex comprises at least two guide nucleic acid sequences.

[0015] In certain aspects, the one or more guide nucleic acid sequences are RNA. Suitably, the guide RNA (gRNA) sequences comprise at least about 90% sequence identity to one or more target nucleic acid sequences in coding and non-coding nucleic acid sequences of the genome, or complementary sequences thereof. In certain aspects, the guide RNA (gRNA) sequences are complementary to one or more target nucleic acid sequences in coding and non-coding nucleic acid sequences of the genome, or complementary sequences thereof.

[0016] In certain aspects, one or more guide RNAs may be used having one or more nucleotide mismatches compared to the target nucleic acid sequence, or complementary sequences thereof. The one or more single-nucleotide mismatches suitably are in one or more guide RNAs inhibit nicking of target genomic DNA.

[0017] In certain aspects, the guide RNA comprises crRNA and tracrRNA.

[0018] In certain aspects, the gene-editing complex comprises CRISPR-associated endonuclease is a Type I, Type II, or Type III Cas endonuclease.

[0019] In certain aspects, the CRISPR-associated endonuclease is a Cas9 endonuclease, a Cas12 endonuclease, a CasX endonuclease, a CasΦ endonuclease or variants thereof. In certain preferred aspects, the CRISPR-associated endonuclease is a Cas9 nuclease or variants thereof. In certain preferred aspects, the Cas9 nuclease is a Staphylococcus aureus Cas9 nuclease.

[0020] In certain aspects, a Cas9 variant comprises a human-optimized Cas9; a nickase mutant Cas9; saCas9; enhanced-fidelity SaCas9 (efSaCas9); SpCas9(K855a); SpCas9(K810A/K1003A/r1060A); SpCas9(K848A/K1003A/R1060A); SpCas9 N497A, R661A, Q695A, Q926A; SpCas9 N497A, R661A, Q695A, Q926A, D1135E; SpCas9 N497A, R661A, Q695A, Q926A L169A; SpCas9 N497A, R661A, Q695A, Q926A Y450A; SpCas9 N497A, R661A, Q695A, Q926A M495A; SpCas9 N497A, R661A, Q695A, Q926A M694A; SpCas9 N497A, R661A, Q695A, Q926A H698A; SpCas9 N497A, R661A, Q695A, Q926A, D1135E, L169A; SpCas9 N497A, R661A, Q695A, Q926A, D1135E, Y450A; SpCas9 N497A, R661A, Q695A, Q926A, D1135E, M495A; SpCas9 N497A, R661A, Q695A, Q926A, D1135E, M694A; SpCas9 N497A, R661A, Q695A, Q926A, D1135E, M698A; SpCas9 R661A, Q695A, Q926A; SpCas9 R661A, Q695A, Q926A, D1135E; SpCas9 R661A, Q695A, Q926A, L169A; SpCas9 R661A, Q695A, Q926A Y450A; SpCas9 R661A, Q695A, Q926A M495A; SpCas9 R661A, Q695A, Q926A M694A; SpCas9 R661A, Q695A, Q926A H698A; SpCas9 R661A, Q695A, Q926A D1135E L169A; SpCas9 R661A, Q695A, Q926A D1135E Y450A; SpCas9 R661A, Q695A, Q926A D1135E M495A; or SpCas9 R661A, Q695A, Q926A, D1135E or M694A.

[0021] In certain aspects, the helicase is a superhelicase. For example, the superhelicase may comprise: a Super Family 1 (SF 1) helicase, a Super Family 2 (SF2) helicase, a Super Family 3 (SF3) helicase, a Super Family 4 (SF4) helicase, a Super Family 5 (SF5) helicase or a Super Family 6 (SF6) helicase.

[0022] In certain aspects, the helicase comprises: a Rep helicase, a UvrD helicase, a Per A helicase or homologs thereof.

[0023] In certain aspects, the helicase is a Rep helicase or homologs thereof.

[0024] In another embodiment, methods are provided for detecting mutations in a genome of a cell or tissue, comprising:
[0025] (a) inducing a nick in genomic DNA by a gene editing complex;
[0026] (b) denaturing the genomic DNA by contacting the genome with a helicase enzyme at the nicked genomic DNA;
[0027] (c) contacting the denatured genomic DNA with a detectably labeled probe, wherein the detectably labeled probe is complementary to the specific nucleic acid sequence of interest; and,
[0028] (d) detecting the mutations in the genome.

[0029] In certain aspects, the specific nucleic acid sequence of interest comprises one or more nucleic acid sequences in coding and non-coding nucleic acid sequences of the genome.

[0030] In certain aspects of these methods, the cell or tissue is a diagnostic for disease such as cancer.

[0031] In certain aspects, the nicking of genomic DNA sequences by the gene editing complex produces a 3′ single-stranded nucleic acid overhang.

[0032] In certain aspects, the helicase binds to the genomic DNA at the site of the nick and unwinds downstream double stranded genomic DNA.

[0033] In certain aspects, the gene editing complex comprises a Clustered Regularly Interspaced Short Palindromic Repeat (CRISPR)-associated endonuclease and at least one guide nucleic acid sequence.

[0034] In certain aspects, the gene editing complex comprises at least two guide nucleic acid sequences.

[0035] In certain aspects, the one or more guide nucleic acid sequences are RNA. Suitably, the guide RNA (gRNA) sequences comprise at least about 90% sequence identity to one or more target nucleic acid sequences in coding and non-coding nucleic acid sequences of the genome, or complementary sequences thereof.

[0036] In certain aspects, the guide RNA (gRNA) sequences are complementary to one or more target nucleic acid sequences in coding and non-coding nucleic acid sequences of the genome, or complementary sequences thereof.

[0037] In certain aspects, one or more guide RNAs are used that have one or more nucleotide mismatches compared to the target nucleic acid sequence, or complementary sequences thereof. Suitably, one or more single-nucleotide mismatches in one or more guide RNAs inhibit nicking of target genomic DNA.

[0038] In certain aspects, the guide RNA comprises crRNA and tracrRNA.

[0039] In certain aspects, the gene-editing complex comprises CRISPR-associated endonuclease is a Type I, Type II, or Type III Cas endonuclease.

[0040] In certain aspects, the CRISPR-associated endonuclease is a Cas9 endonuclease, a Cas12 endonuclease, a CasX endonuclease, a CasΦ endonuclease or variants thereof.

[0041] In certain aspects, the CRISPR-associated endonuclease is a Cas9 nuclease or variants thereof.

[0042] In certain aspects, the Cas9 nuclease is a Staphylococcus aureus Cas9 nuclease.

[0043] In certain aspects, a Cas9 variant comprises a human-optimized Cas9; a nickase mutant Cas9; saCas9; enhanced-fidelity SaCas9 (efSaCas9); SpCas9(K855a); SpCas9(K810A/K1003A/r1060A); SpCas9(K848A/K1003A/R1060A); SpCas9 N497A, R661A, Q695A, Q926A; SpCas9 N497A, R661A, Q695A, Q926A, D1135E; SpCas9 N497A, R661A, Q695A, Q926A L169A; SpCas9 N497A, R661A, Q695A, Q926A Y450A; SpCas9 N497A, R661A, Q695A, Q926A M495A; SpCas9 N497A, R661A, Q695A, Q926A M694A; SpCas9 N497A, R661A, Q695A, Q926A H698A; SpCas9 N497A, R661A, Q695A, Q926A, D1135E, L169A; SpCas9 N497A, R661A, Q695A, Q926A, D1135E, Y450A; SpCas9 N497A, R661A, Q695A, Q926A, D1135E, M495A; SpCas9 N497A, R661A, Q695A, Q926A, D1135E, M694A; SpCas9 N497A, R661A, Q695A, Q926A, D1135E, M698A; SpCas9 R661A, Q695A, Q926A; SpCas9 R661A, Q695A, Q926A, D1135E; SpCas9 R661A, Q695A, Q926A, L169A; SpCas9 R661A, Q695A, Q926A Y450A; SpCas9 R661A, Q695A, Q926A M495A; SpCas9 R661A, Q695A, Q926A M694A; SpCas9 R661A, Q695A, Q926A H698A; SpCas9 R661A, Q695A, Q926A D1135E L169A; SpCas9 R661A, Q695A, Q926A D1135E Y450A; SpCas9 R661A, Q695A, Q926A D1135E M495A; or SpCas9 R661A, Q695A, Q926A, D1135E or M694A.

[0044] In certain aspects, the helicase is a superhelicase comprising: a Super Family 1 (SF 1) helicase, a Super Family 2 (SF2) helicase, a Super Family 3 (SF3) helicase, a Super Family 4 (SF4) helicase, a Super Family 5 (SF5) helicase or a Super Family 6 (SF6) helicase.

[0045] In certain aspects, the helicase comprises: a Rep helicase, a UvrD helicase, a Per A helicase or homologs thereof.

[0046] In certain aspects, the helicase is a Rep helicase or homologs thereof.

[0047] In the present methods, a labeled probe suitably may comprise any xeno nucleic acid or other modified nucleic acid, including but not limited to: 1,5-anhydrohexitol nucleic acid (HNA), cyclohexene nucleic acids (CeNA), Threose nucleic acids (TNA), glycol nucleic acids (GNA), locked nucleic acids (LNA), peptide nucleic acid (PNA), bridged nucleic acids (BNA), Fluoro Arabino nucleic acids (FANA), or chimeric DNA/RNA.

[0048] In the present methods, the labeled probe suitably may be modified with functional groups including but not limited to: polyethylene glycol, cholesterol, fatty acid chains, glycosylation, fluorescent labeling, N6-methyladenosine (m⁶A), N⁶,2′-O-dimethladenosime (m⁶Am), N⁴-acetylcytidine (ac⁴C), 2′-O-methylation, NAD+ cap, inverted dT cap, 2-O′-methy, 2′-deoxy, 2′-hydroxyl, 2′-fluoro, 2′-O-alkyl, 2′-O-alyl, 2′-O-phenyl, 2′-O-sulphur, 2′-carbon linked substitutions, 2′-carbamate linkages, other 2′ sugar substitutions, 5 or 6 pyrimidine substitution, other pyrimidine substitutions, cyclic sugar analogs, and non-phosphorous backbones.

[0049] In certain aspects, a method of detecting single nucleotide variation (SNV) mutations in a genome of a cell or tissue, comprises inducing a nick in genomic DNA by a gene editing complex; denaturing the genomic DNA by contacting the genome with a helicase enzyme at the nicked genomic DNA; contacting the denatured genomic DNA with a detectably labeled probe, wherein the detectably labeled probe is complementary to the specific nucleic acid sequence of interest; and, detecting the SNV mutations in the genome. In certain embodiments, the gene editing complex comprises a Clustered Regularly Interspaced Short Palindromic Repeat (CRISPR)-associated endonuclease and one guide nucleic acid sequence. In certain embodiments, the guide RNAis extended by addition of one or more nucleobases at the 5′ or 3′ end. In certain embodiments, the guide RNA is extended at the 5′. In certain embodiments, the specific nucleic acid sequence of interest comprises one or more nucleic acid sequences in coding and non-coding nucleic acid sequences of the genome. In certain embodiments, the guide RNA (gRNA) sequences comprise at least about 90% sequence identity to one or more target nucleic acid sequences in coding and non-coding nucleic acid sequences of the genome, or complementary sequences thereof. In certain embodiments, the guide RNA comprises one or more nucleotide mismatches compared to the target nucleic acid sequence, or complementary sequences thereof. In certain embodiments, the guide RNA comprises crRNA and tracrRNA. In certain embodiments, the gene-editing complex comprises CRISPR-associated endonuclease is a Type I, Type II, or Type III Cas endonuclease. In certain embodiments, the CRISPR-associated endonuclease is a Cas9 endonuclease, a Cas12 endonuclease, a CasX endonuclease, a CasΦ endonuclease or variants thereof. In certain embodiments, the CRISPR-associated endonuclease is a Cas9 nuclease or variants thereof. In certain embodiments, the Cas9 nuclease comprises a Streptococcus pyogenes Cas9 nuclease or a Staphylococcus aureus Cas9 nuclease. In certain embodiments, a Cas9 variant comprises a single nucleotide variation (SNV) optimized Cas9; a human-optimized Cas9; a nickase mutant Cas9, eCas9 H840A; saCas9; enhanced-fidelity SaCas9 (efSaCas9); SpCas9(K855a); SpCas9(K810A/K1003A/r1060A); SpCas9(K848A/K1003A/R1060A); SpCas9 N497A, R661A, Q695A, Q926A; SpCas9 N497A, R661A, Q695A, Q926A, D1135E; SpCas9 N497A, R661A, Q695A, Q926A L169A; SpCas9 N497A, R661A, Q695A, Q926A Y450A; SpCas9 N497A, R661A, Q695A, Q926A M495A; SpCas9 N497A, R661A, Q695A, Q926A M694A; SpCas9 N497A, R661A, Q695A, Q926A H698A; SpCas9 N497A, R661A, Q695A, Q926A, D1135E, L169A; SpCas9 N497A, R661A, Q695A, Q926A, D1135E, Y450A; SpCas9 N497A, R661A, Q695A, Q926A, D1135E, M495A; SpCas9 N497A, R661A, Q695A, Q926A, D1135E, M694A; SpCas9 N497A, R661A, Q695A, Q926A, D1135E, M698A; SpCas9 R661A, Q695A, Q926A; SpCas9 R661A, Q695A, Q926A, D1135E; SpCas9 R661A, Q695A, Q926A, L169A; SpCas9 R661A, Q695A, Q926A Y450A; SpCas9 R661A, Q695A, Q926A M495A; SpCas9 R661A, Q695A, Q926A M694A; SpCas9 R661A, Q695A, Q926A H698A; SpCas9 R661A, Q695A, Q926A D1135E L169A; SpCas9 R661A, Q695A, Q926A D1135E Y450A; SpCas9 R661A, Q695A, Q926A D1135E M495A; or SpCas9 R661A, Q695A, Q926A, D1135E or M694A. In certain embodiments, the single nucleotide variation (SNV) optimized Cas9 is eSpCas9(1.1). In certain embodiments, the helicase is a superhelicase comprising: a Super Family 1 (SF 1) helicase, a Super Family 2 (SF2) helicase, a Super Family 3 (SF3) helicase, a Super Family 4 (SF4) helicase, a Super Family 5 (SF5) helicase or a Super Family 6 (SF6) helicase. In certain embodiments, the helicase comprises: a Rep helicase, a UvrD helicase, a Per A helicase or homologs thereof.

[0050] In certain embodiments, the CRISPR-associated endonuclease is optimized for expression in a human cell.

[0051] In certain embodiments, the isolated nucleic acid sequences are included in at least one expression vector selected from the group consisting of: a lentiviral vector, an adenovirus vector, an adeno-associated virus vector, a vesicular stomatitis virus (VSV) vector, a pox virus vector, and a retroviral vector. In certain embodiments, the expression vector comprises: a lentiviral vector, an adenoviral vector, or an adeno-associated virus vector. In certain embodiments, the adeno-associated virus (AAV) vector is AV1, AAV2, AAV3, AAV4, AAV5, AAV6, AAV7, AAV8, AAV9, AAV10, AAV11, AAVDJ, or AAVDJ/8. In certain embodiments, the vector comprising the nucleic acid further comprises a promoter. In certain embodiments, the promoter comprises a ubiquitous promoter, a tissue-specific promoter, an inducible promoter or a constitutive promoter.

[0052] Any compositions or methods provided herein can be combined with one or more of any of the other compositions and methods provided herein.

[0053] Other aspects of the invention are disclosed infra.

### Definitions

[0054] Unless defined otherwise, all technical and scientific terms used herein have the same meaning as commonly understood by one of ordinary skill in the art to which the invention pertains. Although any methods and materials similar or equivalent to those described herein can be used in the practice for testing of the present invention, the preferred materials and methods are described herein. In describing and claiming the present invention, the following terminology will be used.

[0055] It is also to be understood that the terminology used herein is for the purpose of describing particular embodiments only, and is not intended to be limiting.

[0056] The articles “a” and “an” are used herein to refer to one or to more than one (i.e., to at least one) of the grammatical object of the article. By way of example, “an element” means one element or more than one element. Thus, recitation of “a cell”, for example, includes a plurality of the cells of the same type. Furthermore, to the extent that the terms “including”, “includes”, “having”, “has”, “with”, or variants thereof are used in either the detailed description and/or the claims, such terms are intended to be inclusive in a manner similar to the term “comprising.”

[0057] As used herein, the terms “comprising,” “comprise” or “comprised,” and variations thereof, in reference to defined or described elements of an item, composition, apparatus, method, process, system, etc. are meant to be inclusive or open ended, permitting additional elements, thereby indicating that the defined or described item, composition, apparatus, method, process, system, etc. includes those specified elements—or, as appropriate, equivalents thereof—and that other elements can be included and still fall within the scope/definition of the defined item, composition, apparatus, method, process, system, etc.

[0058] “About” as used herein when referring to a measurable value such as an amount, a temporal duration, and the like, is meant to encompass variations of +/−20%, +/−10%, +/−5%, +/−1%, or +/−0.1% from the specified value, as such variations are appropriate to perform the disclosed methods. Alternatively, particularly with respect to biological systems or processes, the term can mean within an order of magnitude within 5-fold, and also within 2-fold, of a value. Where particular values are described in the application and claims, unless otherwise stated the term “about” meaning within an acceptable error range for the particular value should be assumed.

[0059] The term “anti-viral agent” as used herein, refers to any molecule that is used for the treatment of a virus and include agents which alleviate any symptoms associated with the virus, for example, anti-pyretic agents, anti-inflammatory agents, chemotherapeutic agents, and the like. An antiviral agent includes, without limitation: antibodies, aptamers, adjuvants, anti-sense oligonucleotides, chemokines, cytokines, immune stimulating agents, immune modulating agents, B-cell modulators, T-cell modulators, NK cell modulators, antigen presenting cell modulators, enzymes, siRNA's, ribavirin, protease inhibitors, helicase inhibitors, polymerase inhibitors, helicase inhibitors, neuraminidase inhibitors, nucleoside reverse transcriptase inhibitors, non-nucleoside reverse transcriptase inhibitors, purine nucleosides, chemokine receptor antagonists, interleukins, or combinations thereof.

[0060] As used herein, the term “crRNA” or “guide RNA” or “single guide RNA” or “sgRNA” or “one or more nucleic acid components” of a CRISPR-Cas comprises any polynucleotide sequence having sufficient complementarity with a target nucleic acid sequence to hybridize with the target nucleic acid sequence and direct sequence-specific binding of a nucleic acid-targeting complex to the target nucleic acid sequence. The guide RNA (gRNA) is a chimeric molecule that consists of tracrRNA and crRNA, anteceded by an 18-20-nt spacer sequence complementary to target DNA before a protospacer adjacent motif (PAM). In some embodiments, the degree of complementarity, when optimally aligned using a suitable alignment algorithm, is about or more than about 50%, 60%, 75%, 80%, 85%, 90%, 95%, 97.5%, 99%, or more. Optimal alignment may be determined with the use of any suitable algorithm for aligning sequences, non-limiting example of which include the Smith-Waterman algorithm, the Needleman-Wunsch algorithm, algorithms based on the Burrows-Wheeler Transform (e.g., the Burrows Wheeler Aligner), ClustalW, Clustal X, BLAT, Novoalign (Novocraft Technologies; available at novocraft.com), ELAND (Illumina, San Diego, Calif.), SOAP (available at soap.genomics.org.cn), and Maq (available at maq.sourceforge.net). The ability of a guide sequence (within a nucleic acid-targeting guide RNA) to direct sequence-specific binding of a nucleic acid-targeting complex to a target nucleic acid sequence may be assessed by any suitable assay. For example, the components of a nucleic acid-targeting CRISPR system sufficient to form a nucleic acid-targeting complex, including the guide sequence to be tested, may be provided to a host cell having the corresponding target nucleic acid sequence, such as by transfection with vectors encoding the components of the nucleic acid-targeting complex, followed by an assessment of preferential targeting (e.g., cleavage) within the target nucleic acid sequence, such as by Surveyor assay as described herein. Similarly, cleavage of a target nucleic acid sequence may be evaluated in a test tube by providing the target nucleic acid sequence, components of a nucleic acid-targeting complex, including the guide sequence to be tested and a control guide sequence different from the test guide sequence, and comparing binding or rate of cleavage at the target sequence between the test and control guide sequence reactions. Other assays are possible, and will occur to those skilled in the art. A guide sequence, and hence a nucleic acid-targeting guide RNA may be selected to target any target nucleic acid sequence. The target sequence may be DNA. The target sequence may be any RNA sequence. In some embodiments, the target sequence may be a sequence within a RNA molecule selected from the group consisting of messenger RNA (mRNA), pre-mRNA, ribosomal RNA (rRNA), transfer RNA (tRNA), micro-RNA (miRNA), small interfering RNA (siRNA), small nuclear RNA (snRNA), small nucleolar RNA (snoRNA), double stranded RNA (dsRNA), non-coding RNA (ncRNA), long non-coding RNA (lncRNA), and small cytoplasmic RNA (scRNA). In some embodiments, the target sequence may be a sequence within a RNA molecule selected from the group consisting of mRNA, pre-mRNA, and rRNA. In some embodiments, the target sequence may be a sequence within a RNA molecule selected from the group consisting of ncRNA, and lncRNA. In some embodiments, the target sequence may be a sequence within an mRNA molecule or a pre-mRNA molecule.

[0061] The term “complementarity” refers to the ability of a nucleic acid to form hydrogen bond(s) with another nucleic acid sequence by either traditional Watson-Crick or other non-traditional types. A percent complementarity indicates the percentage of residues in a nucleic acid molecule which can form hydrogen bonds (e.g., Watson-Crick base pairing) with a second nucleic acid sequence (e.g., 5, 6, 7, 8, 9, 10 out of 10 being 50%, 60%, 70%, 80%, 90%, and 100% complementary). “Perfectly complementary” means that all the contiguous residues of a nucleic acid sequence will hydrogen bond with the same number of contiguous residue in a second nucleic acid sequence. “Substantially complementary” as used herein refers to a degree of complementarity that is at least 60%, 65%, 70%, 75%, 80%, 85%, 90%, 95%, 97%, 98%, 99%, or 100% over a region of 8, 9, 10, 11, 12, 13, 14, 15, 16, 17, 18, 19, 20, 21, 22, 23, 24, 25, 30, 35, 40, 45, 50, or more nucleotides, or refers to two nucleic acids that hybridize under stringent conditions.

[0062] An “effective amount” as used herein, means an amount which provides a therapeutic or prophylactic benefit.

[0063] “Encoding” refers to the inherent property of specific sequences of nucleotides in a polynucleotide, such as a gene, a cDNA, or an mRNA, to serve as templates for synthesis of other polymers and macromolecules in biological processes having either a defined sequence of nucleotides (i.e., rRNA, tRNA and mRNA) or a defined sequence of amino acids and the biological properties resulting therefrom. Thus, a gene encodes a protein if transcription and translation of mRNA corresponding to that gene produces the protein in a cell or other biological system. Both the coding strand, the nucleotide sequence of which is identical to the mRNA sequence and is usually provided in sequence listings, and the non-coding strand, used as the template for transcription of a gene or cDNA, can be referred to as encoding the protein or other product of that gene or cDNA.

[0064] The term “exogenous” indicates that the nucleic acid or polypeptide is part of, or encoded by, a recombinant nucleic acid construct, or is not in its natural environment. For example, an exogenous nucleic acid can be a sequence from one species introduced into another species, i.e., a heterologous nucleic acid. Typically, such an exogenous nucleic acid is introduced into the other species via a recombinant nucleic acid construct. An exogenous nucleic acid can also be a sequence that is native to an organism and that has been reintroduced into cells of that organism. An exogenous nucleic acid that includes a native sequence can often be distinguished from the naturally occurring sequence by the presence of non-natural sequences linked to the exogenous nucleic acid, e.g., non-native regulatory sequences flanking a native sequence in a recombinant nucleic acid construct. In addition, stably transformed exogenous nucleic acids typically are integrated at positions other than the position where the native sequence is found.

[0065] The term “expression” as used herein is defined as the transcription and/or translation of a particular nucleotide sequence driven by its promoter.

[0066] “Expression vector” refers to a vector comprising a recombinant polynucleotide comprising expression control sequences operatively linked to a nucleotide sequence to be expressed. An expression vector comprises sufficient cis-acting elements for expression; other elements for expression can be supplied by the host cell or in an in vitro expression system. Expression vectors include all those known in the art, such as cosmids, plasmids (e.g., naked or contained in liposomes) and viruses (e.g., lentiviruses, retroviruses, adenoviruses, and adeno-associated viruses) that incorporate the recombinant polynucleotide.

[0067] The term “hybridization” refers to a reaction in which one or more polynucleotides react to form a complex that is stabilized via hydrogen bonding between the bases of the nucleotide residues. The hydrogen bonding may occur by Watson Crick base pairing, Hoogsteen binding, or in any other sequence specific manner. The complex may comprise two strands forming a duplex structure, three or more strands forming a multi stranded complex, a single self-hybridizing strand, or any combination of these.

[0068] “Isolated” means altered or removed from the natural state. For example, a nucleic acid or a peptide naturally present in a living animal is not “isolated,” but the same nucleic acid or peptide partially or completely separated from the coexisting materials of its natural state is “isolated.” An isolated nucleic acid or protein can exist in substantially purified form, or can exist in a non-native environment such as, for example, a host cell. An “isolated nucleic acid” refers to nucleic acids which have been substantially purified from other components which naturally accompany the nucleic acid, i.e., RNA or DNA or proteins, which naturally accompany it in the cell. The term therefore includes, for example, a recombinant DNA which is incorporated into a vector, into an autonomously replicating plasmid or virus, or into the genomic DNA of a prokaryote or eukaryote, or which exists as a separate molecule (i.e., as a cDNA or a genomic or cDNA fragment produced by PCR or restriction enzyme digestion) independent of other sequences. It also includes: a recombinant DNA which is part of a hybrid gene encoding additional polypeptide sequence, complementary DNA (cDNA), linear or circular oligomers or polymers of natural and/or modified monomers or linkages, including deoxyribonucleosides, ribonucleosides, substituted and alpha-anomeric forms thereof, peptide nucleic acids (PNA), locked nucleic acids (LNA), phosphorothioate, methylphosphonate, and the like.

[0069] The nucleic acid sequences may be “chimeric,” that is, composed of different regions. In the context of this invention “chimeric” compounds are oligonucleotides, which contain two or more chemical regions, for example, DNA region(s), RNA region(s), PNA region(s) etc. Each chemical region is made up of at least one monomer unit, i.e., a nucleotide. These sequences typically comprise at least one region wherein the sequence is modified in order to exhibit one or more desired properties.

[0070] A nicking enzyme (or nicking endonuclease) is an enzyme that cuts one strand of a double-stranded DNA at a specific recognition nucleotide sequences known as a restriction site. Such enzymes may hydrolyse (cut) only one strand of the DNA duplex, to produce DNA molecules that are “nicked”, rather than cleaved.

[0071] “Protospacer adjacent motif” (PAM) is a 3-nt sequence located immediately downstream of the single guide RNA (sgRNA) target site, which plays an essential role in binding and for Cas-mediated DNA cleavage. The PAMs are the various extended conserved bases at the 5′ or 3′ end of the protospacer.

[0072] The term “stringent conditions” for hybridization refers to conditions under which a nucleic acid having complementarily to a target sequence predominantly hybridizes with the target sequence, and substantially does not hybridize to non-target sequences. Stringent conditions are generally sequence-dependent and vary depending on a number of factors. in general, the longer the sequence, the higher the temperature at which the sequence specifically hybridizes to its target sequence. Non-limiting examples of stringent conditions are described in detail in Tijssen (1993), Laboratory Techniques In Biochemistry And Molecular Biology—Hybridization With Nucleic Acid Probes Part 1, Second Chapter “Overview of principles of hybridization and the strategy of nucleic acid probe assay”, Elsevier, N.Y.

[0073] The term “target nucleic acid” sequence refers to a nucleic acid (often derived from a biological sample), to which the oligonucleotide is designed to specifically hybridize. The target nucleic acid has a sequence that is complementary to the nucleic acid sequence of the corresponding oligonucleotide directed to the target. The term target nucleic acid may refer to the specific subsequence of a larger nucleic acid to which the oligonucleotide is directed or to the overall sequence (e.g., gene or mRNA). The difference in usage will be apparent from context.

[0074] In the context of the present invention, the following abbreviations for the commonly occurring nucleic acid bases are used, “A” refers to adenosine, “C” refers to cytosine, “G” refers to guanosine, “T” refers to thymidine, and “U” refers to uridine.

[0075] Unless otherwise specified, a “nucleotide sequence encoding” an amino acid sequence includes all nucleotide sequences that are degenerate versions of each other and that encode the same amino acid sequence. The phrase nucleotide sequence that encodes a protein or an RNA may also include introns to the extent that the nucleotide sequence encoding the protein may in some version contain an intron(s).

[0076] As used in this specification and the appended claims, the term “or” is generally employed in its sense including “and/or” unless the content clearly dictates otherwise.

[0077] “Parenteral” administration of an immunogenic composition includes, e.g., subcutaneous (s.c.), intravenous (i.v.), intramuscular (i.m.), or intrasternal injection, or infusion techniques.

[0078] The terms “patient” or “individual” or “subject” are used interchangeably herein, and refers to a mammalian subject to be treated, with human patients being preferred. In some cases, the methods of the invention find use in experimental animals, in veterinary application, and in the development of animal models for disease, including, but not limited to, rodents including mice, rats, and hamsters, and primates.

[0079] The term “polynucleotide” is a chain of nucleotides, also known as a “nucleic acid”. As used herein polynucleotides include, but are not limited to, all nucleic acid sequences which are obtained by any means available in the art, and include both naturally occurring and synthetic nucleic acids.

[0080] The terms “peptide,” “polypeptide,” and “protein” are used interchangeably, and refer to a compound comprised of amino acid residues covalently linked by peptide bonds. A protein or peptide must contain at least two amino acids, and no limitation is placed on the maximum number of amino acids that can comprise a protein's or peptide's sequence. Polypeptides include any peptide or protein comprising two or more amino acids joined to each other by peptide bonds. As used herein, the term refers to both short chains, which also commonly are referred to in the art as peptides, oligopeptides and oligomers, for example, and to longer chains, which generally are referred to in the art as proteins, of which there are many types. “Polypeptides” include, for example, biologically active fragments, substantially homologous polypeptides, oligopeptides, homodimers, heterodimers, variants of polypeptides, modified polypeptides, derivatives, analogs, fusion proteins, among others. The polypeptides include natural peptides, recombinant peptides, synthetic peptides, or a combination thereof.

[0081] A “tissue-specific” promoter is a nucleotide sequence which, when operably linked with a polynucleotide encodes or specified by a gene, causes the gene product to be produced in a cell substantially only if the cell is a cell of the tissue type corresponding to the promoter.

[0082] The term “transfected” or “transformed” or “transduced” means to a process by which exogenous nucleic acid is transferred or introduced into the host cell. A “transfected” or “transformed” or “transduced” cell is one which has been transfected, transformed or transduced with exogenous nucleic acid. The transfected/transformed/transduced cell includes the primary subject cell and its progeny.

[0083] “Treatment” is an intervention performed with the intention of preventing the development or altering the pathology or symptoms of a disorder. Accordingly, “treatment” refers to both therapeutic treatment and prophylactic or preventative measures. “Treatment” may also be specified as palliative care. Those in need of treatment include those already with the disorder as well as those in which the disorder is to be prevented. Accordingly, “treating” or “treatment” of a state, disorder or condition includes: (1) preventing or delaying the appearance of clinical symptoms of the state, disorder or condition developing in a human or other mammal that may be afflicted with or predisposed to the state, disorder or condition but does not yet experience or display clinical or subclinical symptoms of the state, disorder or condition; (2) inhibiting the state, disorder or condition, i.e., arresting, reducing or delaying the development of the disease or a relapse thereof (in case of maintenance treatment) or at least one clinical or subclinical symptom thereof; or (3) relieving the disease, i.e., causing regression of the state, disorder or condition or at least one of its clinical or subclinical symptoms. The benefit to an individual to be treated is either statistically significant or at least perceptible to the patient or to the physician.

[0084] A “vector” is a composition of matter which comprises an isolated nucleic acid and which can be used to deliver the isolated nucleic acid to the interior of a cell. Examples of vectors include but are not limited to, linear polynucleotides, polynucleotides associated with ionic or amphiphilic compounds, plasmids, and viruses. Thus, the term “vector” includes an autonomously replicating plasmid or a virus. The term is also construed to include non-plasmid and non-viral compounds which facilitate transfer of nucleic acid into cells, such as, for example, polylysine compounds, liposomes, and the like. Examples of viral vectors include, but are not limited to, adenoviral vectors, adeno-associated virus vectors, retroviral vectors, and the like.

[0085] The term “percent sequence identity” or having “a sequence identity” refers to the degree of identity between any given query sequence and a subject sequence. The term percent “identity,” in the context of two or more nucleic acids or polypeptide sequences, refer to two or more sequences or subsequences that are the same or have a specified percentage of amino acid residues or nucleotides that are the same (e.g., 50%, 55%, 60%, 65%, 70%, 75%, 80%, 85%, 90%, 91%, 92%, 93%, 94%, 95%, 96%, 97%, 98%, 99%, or more identity over a specified region, e.g., of an entire polypeptide sequence or an individual domain thereof), when compared and aligned for maximum correspondence over a comparison window, or designated region as measured using a sequence comparison algorithm or by manual alignment and visual inspection. In embodiments, two sequences are 100% identical. In embodiments, two sequences are 100% identical over the entire length of one of the sequences (e.g., the shorter of the two sequences where the sequences have different lengths). In embodiments, identity may refer to the complement of a test sequence. In embodiments, the identity exists over a region that is at least about 10 to about 100, about 20 to about 75, about 30 to about 50 amino acids or nucleotides in length. In embodiments, the identity exists over a region that is at least about 50 amino acids or nucleotides in length, or more over a region that is 100 to 500, 100 to 200, 150 to 200, 175 to 200, 175 to 225, 175 to 250, 200 to 225, 200 to 250 or more amino acids or nucleotides in length.

[0086] The term “promoter” as used herein is defined as a DNA sequence recognized by the synthetic machinery of the cell, or introduced synthetic machinery, required to initiate the specific transcription of a polynucleotide sequence.

[0087] As used herein, the term “promoter/regulatory sequence” means a nucleic acid sequence which is required for expression of a gene product operably linked to the promoter/regulatory sequence. In some instances, this sequence may be the core promoter sequence and in other instances, this sequence may also include an enhancer sequence and other regulatory elements which are required for expression of the gene product. The promoter/regulatory sequence may, for example, be one which expresses the gene product in a tissue specific manner.

[0088] A “constitutive” promoter is a nucleotide sequence which, when operably linked with a polynucleotide which encodes or specifies a gene product, causes the gene product to be produced in a cell under most or all physiological conditions of the cell.

[0089] An “inducible” promoter is a nucleotide sequence which, when operably linked with a polynucleotide which encodes or specifies a gene product, causes the gene product to be produced in a cell substantially only when an inducer which corresponds to the promoter is present in the cell.

[0090] The terms “pharmaceutically acceptable” (or “pharmacologically acceptable”) refer to molecular entities and compositions that do not produce an adverse, allergic or other untoward reaction when administered to an animal or a human, as appropriate. The term “pharmaceutically acceptable carrier,” as used herein, includes any and all solvents, dispersion media, coatings, antibacterial, isotonic and absorption delaying agents, buffers, excipients, binders, lubricants, gels, surfactants and the like, that may be used as media for a pharmaceutically acceptable substance.

[0091] Genes: All genes, gene names, and gene products disclosed herein are intended to correspond to homologs from any species for which the compositions and methods disclosed herein are applicable. It is understood that when a gene or gene product from a particular species is disclosed, this disclosure is intended to be exemplary only, and is not to be interpreted as a limitation unless the context in which it appears clearly indicates. Thus, for example, for the genes or gene products disclosed herein, are intended to encompass homologous and/or orthologous genes and gene products from other species.

[0092] Ranges: throughout this disclosure, various aspects of the invention can be presented in a range format. It should be understood that the description in range format is merely for convenience and brevity and should not be construed as an inflexible limitation on the scope of the invention. Accordingly, the description of a range should be considered to have specifically disclosed all the possible subranges as well as individual numerical values within that range. For example, description of a range such as from 1 to 6 should be considered to have specifically disclosed subranges such as from 1 to 3, from 1 to 4, from 1 to 5, from 2 to 4, from 2 to 6, from 3 to 6 etc., as well as individual numbers within that range, for example, 1, 2, 2.7, 3, 4, 5, 5.3, and 6. This applies regardless of the breadth of the range.

### BRIEF DESCRIPTION OF THE DRAWINGS

[0093] The patent or application file contains at least one drawing executed in color. Copies of this patent or patent application publication with color drawings will be provided by the Office upon request and payment of the necessary fee.

[0094] FIG. 1 (includes FIGS. 1A-1F) shows Cas9 exposes the NTS 3′ flap for Rep-X loading and unwinding the downstream dsDNA. FIG. 1A: Schematic of Rep-X loaded on the NTS 3′ flap and translocating along the DNA strand. The NTS 3′ flap is outlined in a dash box. FIG. 1B: Schematic of GOLD FISH. The unwound DNA may not rezip behind the translocating helicase for three possible reasons indicated. FIG. 1C: Schematic for the DNA helicase invasion assay. A nick is indicated in the figure at 20 bp downstream of the protospacer. FIG. 1D: Representative images at different time points during the DNA helicase invasion assay. Note that the images were taken at different locations on the slide surface. Scale bar, 5 μm. FIG. 1E: Spot number per imaging view decreased with time in the DNA helicase invasion assay when using Cas9_{dHNH}. FIG. 1F: Spot number per imaging view did not change with time with dCas9 or in the absence of ATP. Error bar represent mean±SD (n=20). n represents number of different imaging views. The experiments were repeated twice independently with similar results.

[0095] FIG. 2 (includes FIGS. 2A-2F) shows GOLD FISH targeting a repetitive region within the MUC4 gene (MUC4-R). FIG. 2A: A representative image of GOLD FISH against MUC4-R in IMR-90 cells. A single cell outlined in green is magnified on the upper-right corner. Probes were Cy5-labeled, and nuclei were stained using Hoechst 33342. Scale bar, 10 μm. FIG. 2B: (Left panel) Histogram of number of MUC4 foci detected in each cell (n=78). Percentages of total cells are indicated. (Right panel) Box plot of signal-to-background ratio of detected FISH spots. Mean±SD are represented using a black line and box. Each dot represents one FISH spot (n=163). FIG. 2C: Schematic for GOLD FISH using ATTO550-labeled guide RNA. ATTO550 was conjugated at the 5′ end of tracrRNA. FIG. 2D: Quantification of co-localized loci from ATTO550-guide RNA and Cy5-GOLD FISH probe. The black numbers indicate spot number examined in each channel. FIG. 2E: A representative image of MUC4 fluorescent signals from ATTO550-guide RNA (green) and Cy5-GOLD FISH probes (magenta) in HEK293ft cells. Scale bar, 5 μm. FIG. 2F: Comparison of the signal-to-background ratio of ATTO550 foci and Cy5 foci from the co-localization assay, and CASFISH foci using Cas9_{dHNH} and dCas9. Mean SD are represented using a line and box in the box plot. Each dot represents one FISH spot (n=135, 146, 197 and 154 for ‘ATTO550 foci’, ‘Cy5 foci’, ‘CASFISH foci Cas9_{dHNH}’ and ‘CASFISH foci dCas9’ respectively). ***P<0.001 (Student's t-test).

[0096] FIG. 3 (includes FIGS. 3A-3G) shows GOLD FISH targeting a non-repetitive region within the MUC4 gene. FIG. 3A: (Top) A schematic showing Cas9 binding sites and probe targeting region for GOLD FISH against MUC4 non-repetitive region (MUC4-NR) using MUC4-NR guide-RNA set 1. (Bottom) A representative image of GOLD FISH against MUC4-NR and MUC4 repetitive region (MUC4-R) in an IMR-90 cell. Scale bar, 5 μm. FIG. 3B: (Left panel) Histogram of number of MUC4-NR foci detected in each cell (n=78). Percentages of total cells are indicated. (Right panel) Box plot of signal-to-background ratio of detected MUC4-NR FISH spots, mean±SD are represented using a black line and box. Each dot represents a FISH spot. n=167. FIG. 3C: Quantification of co-localized foci from MUC4-NR and MUC4-R GOLD FISH. The black numbers indicate spot number examined in each channel. FIG. 3D: (Top) A schematic showing 11 guide RNAs (MUC4-NR guide-RNA set 2) designed to target sites flanking the probes tiling region of MUC4-NR. (Bottom) A representative image of GOLD FISH using the MUC4-NR guide-RNA set 2 in an IMR-90 cell. Scale bar, 5 μm. FIG. 3E: (Left panel) Histogram of number of MUC4-NR foci detected in each cell using the MUC4-NR guide-RNA set 2 (n=76). Percentages of total cells are indicated. (Right panel) Box plot of signal-to-background ratio of MUC4-NR FISH spots using the MUC4-NR guide-RNA set 2. Mean±SD are represented using a black line and box. Each dot represents a FISH spot (n=90). FIG. 3F: (Top) A schematic showing MUC4-I1 guide RNA designed to target a repetitive region that is 30-kb away from the probes tiling region of MUC4-NR. (Bottom) A representative image of GOLD FISH using the MUC4-I1 guide RNA in an IMR-90 cell. Scale bar, 5 μm. FIG. 3G: Histogram of number of MUC4-NR foci detected in each cell using the MUC4-I1 guide RNA (n=70). Percentages of total cells are indicated.

[0097] FIG. 4 (includes FIGS. 4A-4E) shows GOLD FISH shows conformational differences of active ChrX and inactive ChrX by multi-color imaging and chromosomal scale paint. FIG. 4A: (Top) A schematic of TAD5 and TAD37 regions in chromosome X. (Bottom) A representative image of GOLD FISH against TAD5 (magenta) and TAD37 (green) in an IMR-90 cell. MacroH2A.1 immunostaining (cyan) was used to distinguish inactive ChrX from active ChrX. White arrow indicates the inactive ChrX. Scale bar, 5 μm. FIG. 4B: Box plots of distance between TAD5 and TAD37 of ChrX for active ChrX and inactive ChrX. Mean±SD are represented using a line and box. Each dot represents a ChrX measured (n=83 for active ChrX and 86 for inactive ChrX). ***P<0.001 (Student's t-test). FIG. 4C: DNA probe design for ChrX paint GOLD FISH. The primary probe has two Priming regions for PCR amplification, a Readout region complementary to fluorescently labeled Readout probe and an Encoding region for hybridization to genomic DNA. Cas9 RNP and Rep-X are omitted in this figure. FIG. 4D: A representative image of p-arm (green) and q-arm (magenta) of ChrX ‘painted’ by GOLD FISH. MacroH2A.1 immunostaining (cyan) was used to distinguish inactive ChrX from active ChrX. White arrow indicates the inactive ChrX. Scale bar, 5 μm. FIG. 4E: Box plots of center of mass distance between p-arm and q-arm of ChrX for active ChrX and inactive ChrX. Each dot represents a ChrX measured (n=101 for active ChrX and 99 for inactive ChrX). Mean±SD are represented using a line and box. ***P<0.001 (Student's t-test).

[0098] FIG. 5 (includes FIGS. 5A-5F) shows HER2 gene amplification detection in human tissue samples. FIG. 5A: A schematic of HER2 gene, CEP17 and RARA gene in chromosome 17 (Chr17). FIG. 5B: A representative view of GOLD FISH against HER2 gene (yellow) with HER2 protein immunostaining (red) and DNA staining by Hoechst 33342 (blue) on a breast cancer tissue sample from a patient. Sub-regions outlined in green boxes are zoomed showing HER2 amplified cells and HER2 non-amplified cells, respectively. Scale bar, 10 μm. FIG. 5C: A representative view of GOLD FISH against HER2 gene (yellow, left) and CEP17 (green, right) with HER2 protein immunostaining (red) and DNA staining by Hoechst 33342 (blue). Scale bar, 10 μm. FIG. 5D: Histograms of number of HER2 foci in each cell of the breast cancer tissue sample (n=161). Percentages of total cells are indicated. FIG. 5E: Histograms of number of CEP17 foci in each cell (n=161). Percentages of total cells are indicated. FIG. 5F: Box plots of loci number ratio of HER2 to CEP17 and HER2 to RARA. Each dot represents one cell. Mean±SD are represented using a line and box (n=159 for HER2/CEP17 and n=95 for HER2/RARA). ***P<0.001 (Student's t-test).

[0099] FIG. 6 (includes FIGS. 6A-6E) shows GOLD FISH against a repetitive region within the MUC4 gene (MUC4-R), related to FIG. 2. FIG. 6A: (Left) A representative image of GOLD FISH against MUC4-R using dCas9. Scale bar, 10 m. (Right) Quantification of detected loci number per cell for GOLD FISH against MUC4-R using dCas9 (n=55). Percentages of total cells are indicated. FIG. 6B: (Left) A representative image of GOLD FISH against MUC4-R using Cas9_{dHNH} in the absence of ATP. Scale bar, 10 m. (Right) Quantification of number of detected loci per cell for GOLD FISH against MUC4-R using Cas9_{dHNH} in the absence of ATP (n=41). Percentages of total cells are indicated. FIG. 6C: (Left) Schematic of CASFISH using ATTO550-labeled guide RNA against MUC4-R and Cas9_{dHNH}. (Right) A representative image of the CASFISH experiment. Scale bar, 5 m. FIG. 6D: (Left) Schematic of CASFISH using ATTO550-labeled guide RNA against MUC4-R and dCas9. (Right) A representative image of the CASFISH experiment. Scale bar, 5 m. FIG. 6E: (E) (Left) Nuclear background in ATTO550 channel after the co-localization assay against MUC4-R using ATTO550-labeled guide RNA and no Cas9 enzyme control. Each dot represents the average nuclear intensity in a cell. Mean±SD are represented using lines and boxes (n=51 for ‘+ Cas9’ and n=49 for ‘− Cas9’). (Right) Nuclear background in ATTO550 channel after CASFISH against MUC4-R using Cas9_{dHNH} with ATTO550-labeled guide RNA and no Cas9 enzyme control. Each dot represents the average nuclear intensity in a cell. Mean±SD are represented using lines and boxes (n=60 for ‘+ Cas9’ and n=54 for ‘− Cas9’). The nuclear background intensity in the ‘− Cas9’ control was negligible compared to that in ‘+ Cas9’, suggesting non-specific intracellular binding of ATTO550-labeled Cas9_{dHNH} RNP was mainly responsible to nuclear background in the co-localization assay and CASFISH.

[0100] FIG. 7 shows a representative imaging view of GOLD FISH against MUC4-NR in IMR-90 cells using MUC4-NR guide-RNA set 1, related to FIG. 3. Scale bar, 10 m.

[0101] FIG. 8 (includes FIGS. 8A-8E) shows results of buffered ethanol (BE70)-based fixation effectively preserved nuclear size, enabling GOLD FISH to demonstrate the conformational differences between active and inactive X chromosomes, related to FIG. 4. In this work we adopted two fixation methods: (1) MAA fixation (FIGS. 2 and 3): cells were fixed in MAA solution (pre-chilled methanol and acetic acid mixed at 1:1 ratio) for 20 min at −20° C. (2) BE70-MAA fixation (FIGS. 4 and 5): cells were fixed in BE70 at room temperature for 25 min, follow by incubation in MAA solution for 20 min at −20° C. We found the incubation in MAA solution was necessary for efficient GOLD FISH labeling in BE70-fixed cells, presumably because MAA solution further permeabilized the cells. See the ‘Fixation of cultured cell and tissue section’ section in ‘Method Details’ for details. FIG. 8A: Representative images of DNA stained by Hoechst 33342 in live and ‘after GOLD FISH’ IMR-90 cells using different fixatives. Scale bar, m. The ‘After GOLD FISH’ cells were fixed using either the first fixation method (MAA) or the second fixation method (BE70+MAA) described above, followed by a GOLD FISH protocol. See ‘Comparison of live and after-GOLD FISH cells’ section in ‘Method Details’ for details. FIG. 8B: Quantification of projected nuclear area change in live and ‘after GOLD FISH’ cells. AreaLive, the projected nuclear area in a live cell. AreaGOLDFISH, the projected nuclear area in the same cell after fixation (by either MAA or BE70+MAA) and GOLD FISH. The y-axis is the ratio of AreaGOLDFISH to AreaLive. Each dot represents one nucleus (n=43 for Buffered ethanol and n=38 for methanol-acetic acid). Mean±SD are represented using a black line and box. Buffered ethanol fixation preserves nuclear size substantially better than methanol-acetic acid fixation. See ‘Comparison of live and after-GOLD FISH cells’ section in ‘Method Details’ for details. ***P<0.001 (Student's t-test). FIG. 8C: A representative image of GOLD FISH against TAD5 (magenta) and TAD37 (green) regions in IMR-90 cells. MacroH2A.1 immunostaining (cyan) was performed to distinguish inactive ChrX from active ChrX. Scale bar, m. FIG. 8D: A representative image of GOLD FISH using TAD5 guide RNAs with TAD37 probes (green) and quantification of foci per cell (n=44). Percentages of total cells are indicated in the histogram. MacroH2A.1 immunostaining (cyan) was performed to distinguish inactive ChrX from active ChrX. Scale bar, 5 m. FIG. 8E: A representative image of GOLD FISH using TAD37 guide RNAs with TAD5 probes (magenta) in and quantification of foci per cell (n=55). Percentages of total cells are indicated in the histogram. MacroH2A.1 immunostaining (cyan) was performed to distinguish inactive ChrX from active ChrX. Scale bar, 5 m.

[0102] FIG. 9 (includes FIGS. 9A-9B) shows p-arm and q-arm ‘paint’ of ChrX by GOLD FISH, related to FIG. 4. FIG. 9A: A representative imaging view of p-arm (green) and q-arm (magenta) of ChrX ‘painted’ using GOLD FISH in IMR-90 cells. Scale bar, 10 m. FIG. 9B: Box plot of volumes of active ChrX and inactive ChrX using GOLD FISH. Each dot represents one ChrX. Mean±SD are represented using lines and boxes. (n=101 for active ChrX and n=99 for inactive ChrX). ***P<0.001 (Student's t-test).

[0103] FIG. 10 (includes FIGS. 10A-10D) shows GOLD FISH in tissue samples, crRNA synthesis for GOLD FISH, GOLD FISH probe density and GOLD FISH in PFA-fixed cells, related to FIG. 5. FIG. 10A: A representative view of GOLD FISH against HER2 gene (yellow, left) and RARA (cyan, right) with HER2 protein immunostaining (red) and DNA staining by Hoechst 33342 (blue) on a breast cancer tissue sample from a patient. Scale bar, 10 m. FIG. 10B: Transcription efficiency comparison of canonical crRNA and 5′-extended crRNA. (Left) The sequences of four canonical crRNAs (cr1, cr2, cr3, cr4), four 5′-extended crRNAs (Ex-cr1, Ex-cr2, Ex-cr3, Ex-cr4) and the DNA template for in vitro transcribing Ex-cr4. The protospacer sequences is bold-faced. The common 5′-extension sequence is colored in blue, which makes in vitro transcription efficiency of different crRNAs more homogenous. The DNA template for in vitro transcribing Ex-cr4 were partially double-stranded, including a double-stranded T7 promoter region and a single-stranded template region. (Right) A PAGE gel image shows in vitro transcription yields of different crRNAs under the same reaction condition. FIG. 10C: Probe densities of GOLD FISH, iFISH and OligoMiner against TAD37, TAD5, RARA, HER2 and MUC4-NR regions. Here the ‘probes’ in GOLD FISH refers to DNA oligo probes. ‘Balanced’, ‘Coverage’ and ‘Stringent’ are different probe mining parameters in the OligoMiner DNA FISH method. The probe densities of iFISH and OligoMiner against the five non-repetitive regions were obtained from ifish4u.org/probe-design/. FIG. 10D: A representative view of GOLD FISH against MUC4-NR using MUC4-NR guide-RNA set 1 in PFA-fixed IMR-90 cells. Nuclei were stained by Hoechest 33342 (blue). Scale bar, 10 μm.

[0104] FIG. 11 (includes FIGS. 11A-11D) shows single-nucleotide variation detection by GOLD FISH. GOLD FISH was performed to target a repetitive region (“MUC4-R”, green signals) and a non-repetitive region (“MUC4-SNV”, magenta signals) within the MUC4 gene using (A and B) on-target guide RNA or (C and D) 1 mismatched guide RNA against the MUC4-SNV region. (B and D) Histograms show number MUC4-SNV foci in each cell versus cell counts.

[0105] FIGS. 12A-12C show single-nucleotide variation detection by sgGOLDFISH. FIG. 12A: Schematic of SNV detection using sgGOLDFISH. Genomic DNA in red is homologous to guide RNA. FIG. 12B: Top, sequences of MUC4-NR target protospacer and gMUC4-OneMM or gMUC4-TwoMM. The blue-colored G represents the extended guanine at the 5′ of the guide RNA. Red-colored nucleotides represent mismatches. Bottom, a representative sgGOLDFISH image using gMUC4-OneMM (single cells outlined in orange are magnified on the upper-right corner), histograms of sgGOLDFISH foci using gMUC4-OneMM (n=78) or gMUC4-TwoMM (n=100), and quantification of co-localized foci from MUC4-R and MUC4-NR probes. FIG. 12C: Top, sequences of LMNA target protospacer and gLMNA-WT. Bottom, a representative sgGOLDFISH image using gLMNA-WT (single cells outlined in orange are magnified on the upper-right corner), and histograms of sgGOLDFISH foci using gLMNA-WT (n=121) or gLMNA-MUT (n=110).

[0106] FIGS. 13A-13I show SNV detection in HGPS cells. FIG. 13A: Schematic of HGPS pathogenic point mutation. FIG. 13B: Schematic of ABE editing of HGPS fibroblasts. c, Base identity at the HGPS mutation site before and after ABE treatment. The error bar represents mean±SD (n=3). FIGS. 13D, 13E: sgGOLDFISH in parallel with progerin immunofluorescence using (FIG. 13D) gLMNA-MUT or (FIG. 13E) gLMNA-WT. FIGS. 13F and 13G: Quantifications of progerin immunofluorescence intensity from different populations. Each dot represents a quantified cell (n=44 to 152 for each condition). Mann-Whitney U Test is used. n.s. represents p>0.05. Box represents the range of 25^{th} to 75^{th} percentiles, and whisker represents the range of 10^{th} to 90^{th} percentiles. Median line is shown in the box. FIG. 13H: Schematic of measuring distance from the FISH spot to the nuclear edge or the major/minor axes using sgGOLDFISH image data. FIG. 13I: Quantifications of the relative distance (i.e., the distance from a FISH spot to the nuclear edge divided the square root of the nuclear area) of LMNA and MUC4 alleles to the nuclear edge. Each dot represents a quantified FISH spot (n=538 to 994 for each condition). Student's t test is used. Median line is shown. Whisker represents mean±SD.

[0107] FIGS. 14A, 14B show a comparison between GOLDFISH and sgGOLDFISH. FIG. 14A: Schematic of GOLDFISH. The Cas9 nickase RNP is applied to fixed and permeabilized cells to cleave the genomic DNA. Then Rep-X along with ATP is added to unwind the genomic DNA from the Cas9 cleavage sites. Finally, fluorescently labeled oligo FISH probes are added to hybrid to sequences of interest. Multiple different guide RNA species and oligo FISH probes are used in the GOLDFISH. The target region (i.e., guide RNA target protospacers and probe hybridization sites) spans typically 2 kb to 5 kb. FIG. 14B: Schematic of sgGOLDFISH. The experimental procedure is the same as GOLDFISH, but only 1 guide RNA species is used in the sgGOLDFISH. The target region (i.e., the guide RNA target protospacer and probe hybridization sites) spans typically around 1.5 kb.

[0108] FIGS. 15A-15E show the eCas9 RNP and the in vitro cleavage assay. FIG. 15A: Schematic of eCas9 RNP. Compared to canonical guide RNA, the 5′ extended guide RNA used in this study has an extra guanine (bolded in the figure) at the 5′ of the crRNA. FIG. 15B: Schematic of in vitro cleavage assay. eCas9 RNP was mixed with DNA substrate and incubated for 1 hour at 37° C. Then proteinase K was added to digest bound and free eCas9. Finally, the reaction was loaded into an agarose gel for electrophoresis. FIG. 15C: Sequences of DNA substrate and guide RNA tested in the in vitro cleavage assay. The DNA substrate was PCR-synthesized using human genomic DNA and primers against a non-repetitive region of the MUC4 gene. A group of guide RNAs with 1 or 2 mismatches against the target protospacer were used in the cleavage assay. The blue “G” represents the 5′ extended guanine of the crRNA. The red colored nucleotides represent mismatches against the DNA substrate. FIG. 15D: Gel image of the in vitro cleavage assay using guide RNA with 5′ extended guanine. FIG. 15E: Gel image of the in vitro cleavage assay using canonical guide RNA (i.e., without the 5′ extended guanine). Significant cleavage activity was observed with the canonical guide RNA even if there are two mismatches between the guide RNA and DNA substrate.

[0109] FIGS. 16A-16C show the SSB-ddPCR assay. FIG. 16A: Schematic of SSB-ddPCR. FIG. 16B: Representative SSB-ddPCR results using eCas9 nickase and (top) gMUC4-TwoMM or (bottom) gMUC4-OneMM. FIG. 16C: Left, bar plot of fraction of −FAM+HEX droplets from the SSB-ddPCR using gMUC4-TwoMM or gMUC4-OneMM. Right, standard curve of the ddPCR assay. Student's t test is used. n.s. represents p>0.05. Error bar represents mean standard deviation from at least 3 replicates.

[0110] FIGS. 17A-17C show the control experiments for SSB-ddPCR. FIG. 17A: The in vitro cleavage assay to measure the efficiency of DNA cleavage by Cas9 nickase RNP in the step 2 in FIG. 16A. In this assay, 600 ng PCR-synthesized DNA substrate (FIG. 15C) was mixed with 400 nM Cas9 nickase RNP cleaving the top strand and 400 nM Cas9 nickase RNP cleaving the bottom strand, and incubated for 1 hour at 37° C. The 400 nM Cas9 RNP cleaving the bottom strand was also used in the step 2 in FIG. 16A. Less than 600 ng genomic DNA was harvested in the step 1 in FIG. 16A. After proteinase K treatment, the reaction was heated at 90° C. for 1 min to dissociate the two parts of the double-nicked DNA, followed by agarose gel electrophoresis. FIG. 17B: Gel image of the in vitro cleavage assay. Only the 3^{rd} lane shows close to cleavage efficiency indicates the 400 nM Cas9 RNP cleaving the bottom strand cleaved almost all DNA molecules. FIG. 17C: Representative SSB-ddPCR result using dCas9 and gMUC4-OneMM.

[0111] FIG. 18 shows the generation of the standard curve of SSB-ddPCR. Schematic of the generating standard curve in FIG. 16C.

[0112] FIGS. 19A, 19B show a schematic of sgGOLDFISH against the MUC4-NR region and GOLDFISH against the MUC4-R region. FIG. 19A: Only one guide RNA (gMUC4-OneMM or gMUC4-TwoMM) and 23 oligo FISH probes are used to target the MUC4-NR region. The figure shows the case that gMUC4-OneMM is used (there is one mismatch between guide RNA and target protospacer). In contrast, although only one guide RNA (gMUC4-R) and one oligo FISH probe are used to target MUC4-R region, the MUC4-R region contains multiple repeats, therefore multiple binding sites for eCas9 nickase RNP complexed with gMUC4-R and the FISH probe against MUC4-R region. FIG. 19B: Top, sequences of MUC4-NR target protospacer and gMUC4-OneMM or gMUC4-TwoMM. The blue-colored G represents the extended guanine at the 5′ of the guide RNA. Red-colored nucleotides represent mismatches. Bottom, a representative sgGOLDFISH image using gMUC4-OneMM without proteinase treatment in HEK293T cells (single cells outlined in orange are magnified on the upper-right corner), and histograms of sgGOLDFISH foci using gMUC4-OneMM (n=109) or gMUC4-TwoMM (n=94).

[0113] FIGS. 20A, 20B show an in vitro cleavage assay to measure cleavage activity of eCas9 in complex with different guide RNA against the LMNA gene. FIG. 20A: The DNA substrate was PCR-synthesized using human genomic DNA and primers against a non-repetitive region of the LMNA gene. A group of guide RNAs with PAM-distal mismatches against the target protospacer were used in the cleavage assay. The blue “G” represents the 5′ extended guanine of the crRNA. The red colored nucleotides represent mismatches against the DNA substrate. FIG. 20B: Gel image of the in vitro cleavage assay using the guide RNAs and the DNA substrate in FIG. 20A.

[0114] FIGS. 21A-21D show schematics of sgGOLDFISH against LMNA. FIG. 21A: Schematic of sgGOLDFISH against LMNA using gLMNA-MUT or gLMNA-WT. The figure shows the scenario that gLMNA-WT is used to target a wild-type LMNA allele (there is one mismatch between guide RNA and target protospacer). FIG. 21B: Statistics of the width of the LMNA foci from the sgGOLDFISH using gLMNA-WT in FIG. 12C. Each dot represents a quantified LMNA focus (n=137). Median line is shown. Whisker represents mean±standard deviation (SD). FIG. 21C: Sequences of the target protospacer of the LMNA-WT allele and gLMNA-MUT or gLMNA-WT. The blue “G” represents the 5′ extended guanine of the guide RNA. The red colored nucleotides represent mismatches against the protospacer. FIG. 21D: Sequences of the target protospacer of the LMNA-MUT allele and gLMNA-MUT or gLMNA-WT. The blue “G” represents the 5′ extended guanine of the guide RNA. The red colored nucleotides represent mismatches against the protospacer. The bolded ‘A-T’ base pair indicates the LMNA c.1824 C>T mutation in HGPS fibroblasts.

[0115] FIGS. 22A-22D show the DNA-free base editing to correct the HGPS pathogenic point mutation. FIG. 22A: Representative Sanger sequencing results of untreated and ABE-treated HGPS fibroblasts. The black arrow indicates the HGPS pathogenic point mutation site. FIG. 22B: Representative images showing whisker represents the morphology difference of Lamin A/C meshwork between untreated and ABE-treated HGPS fibroblasts. White arrows indicate morphologically abnormal nuclei. FIG. 22C: Quantification of fraction of morphologically abnormal nuclei in untreated and ABE-treated HGPS fibroblasts. Morphologically abnormal nuclei were identified by visual inspection. More than 150 cells were quantified for each condition. The dataset was quantified twice by two persons independently. The error bar indicates the difference between the two quantifications. Student's t test is used. FIG. 22D: Quantifications of base identity at the HGPS pathogenic point mutation site at different time points after mixing untreated and ABE-treated HGPS fibroblasts at 1:1 ratio (i.e., 1:1 mixture). The base identity was measure by Sanger sequencing. The data indicates the 1:1 mixture contains roughly 50% uncorrected and 50% ABE-corrected HGPS fibroblast within 24 hours.

[0116] FIGS. 23A-23C show that sgGOLDFISH signals can be used for spatial analysis. FIG. 23A: A representative image of sgGOLDFISH against LMNA using gLMNA-MUT and progerin immunofluorescence in 1:1 mixture. The “mutant-positive cells” are indicated by white arrows. FIG. 23B: A representative image of sgGOLDFISH against LMNA using gLMNA-WT and progerin immunofluorescence in 1:1 mixture. The “correction-positive cell” is indicated by a white arrow. FIG. 23C: Lamin A/C-ChIP data of the HGPS fibroblasts from a previous study (https://research.nhgri.nih.gov/manuscripts/Collins/HGPSepigenetics)²⁰. The enrichment (i.e., Avg Log(HGPS/Input)) of the LMNA and MUC4 genes in Lamin A/C ChIP is shown. Smaller value (i.e., more negative) suggests less enriched in Lamin A/C ChIP, which shows the LMNA gene is less enriched than the MUC4 gene in Lamin A/C ChIP. This is consistent with our data in FIG. 23B which shows that the MUC4 alleles are closer the nuclear edge than the LMNA alleles.

### DETAILED DESCRIPTION

[0117] We developed Genome Oligopaint via Local Denaturation Fluorescence in Situ Hybridization (GOLD FISH). Our systems are clear improvements over DNA FISH technology. See FIG. 1B.

[0118] Compared to traditional DNA FISH which requires global denaturation of genomic DNA using harsh denaturing conditions, GOLD FISH locally denatures genomic DNA by programmed loading of an engineered superhelicase at nicks generated by the CRISPR-Cas9 nickase, allowing fluorescently labeled probes to hybridize with sequences of interest (See FIGS. 1A-1B). GOLD FISH labels target genomic loci with much higher signal-to-background ratio compared to other CRISPR-Cas9 based genome imaging methods such as CASFISH (See FIG. 2). GOLD FISH robustly targets non-repetitive genomic DNA sequences ranging for example from 2 kilobases to whole chromosome, which can be used for imaging of chromatin conformations in basic research (See FIG. 3 and FIG. 4). Traditional DNA FISH requires days to detect HER2 gene amplification in potential breast cancer patient tissue. In contrast, GOLD FISH can rapidly detect HER2 gene amplification in patient tissue samples within 6 hours, potentially facilitating clinical diagnosis (See FIG. 5).

[0119] One of unique feature of GOLD FISH is that the labeling of GOLD FISH relies on Cas9 nicking the genomic DNA strand, which provide a 3′ single-stranded DNA overhang, allowing Rep-X to load on and unwind downstream dsDNA (See FIGS. 1A-1B). Cas9's DNA nicking activity can be fine-tuned by intentionally introducing mismatches into guide-RNA in combination with previously engineered high-specificity Cas9 variants, so that any additional single-nucleotide mismatch against guide RNA will inhibit nicking of target genomic DNA. By using the nicking activity fine-tuned Cas9 RNP, GOLD FISH can achieve single-nucleotide sensitivity (See FIG. 11). In FIG. 11, GOLD FISH was performed to target a repetitive region (“MUC4-R”, green signals) and a non-repetitive region (“MUC4-SNV”, magenta signals) within the MUC4 gene. When on-target guide RNA against the MUC4-SNV region was used, ˜50% cells had at least one MUC4-SNV foci (See FIGS. 11A and 11B). However, when a guide RNA with 1 nucleotide mismatch against desired sequence was used, the labeling efficiency was minimal (See FIGS. 11C and 11D). The data suggest that GOLD FISH can detect single-nucleotide mutations at single-cell level. Many diseases are cause by a single nucleotide mutation. For example, the Hutchinson-Gilford progeria syndrome (characterized by accelerated ageing) is caused by a point mutation (c. 1824 C>T) in the LMNA gene. GOLD FISH could be used to image cells carrying the single-nucleotide mutations of interest in patient tissue samples. In addition, base editors become more and more popular genome editing tools because they do not generate double-strand breaks during editing. GOLD FISH can in situ label cells that have been edited by base editors, provide additional spatial information at single-cell level compared to other sequencing-based methods.

[0120] Accordingly, in some embodiments, are methods and compositions comprising a CRISPR-associated (Cas) peptide or a nucleic acid sequence encoding the CRISPR-associated (Cas) peptide and a plurality of guide nucleic acids or a nucleic acid sequence encoding the plurality of guide nucleic acids. In some embodiments, compositions and methods described herein comprise 1, 2, 3, 4, 5, 6, or more than 6 gRNAs. In some embodiments, compositions and methods described herein comprise 1, 2, 3, 4, 5, 6, or more than 6 different gRNAs. In some embodiments, compositions and methods described herein comprise 4 or at least 4 different gRNAs.

[0121] In certain embodiments, the compositions of the disclosure include nucleic acids encoding gene editing agents and at least one guide RNA (gRNA) that is complementary to a target sequence, such as for example, a tumor nucleic acid sequence, a virus sequence, a genetic disorder and the like. Indeed, the target sequence can be any sequence wherein a mutation may be present. In certain embodiments, the gene editing agents comprise: Cre recombinases, CRISPR/Cas molecules, TALE transcriptional activators, Cas9 nucleases, nickases, transcriptional regulators, homologues, orthologs or combinations thereof. In certain embodiments, the target sequences comprise coding sequences, noncoding sequences or combinations thereof. In certain embodiments, the guide nucleic acid sequences target one or more target sequences comprising: structural gene sequences, enzymatic gene sequences, regulatory genes, and the like.

[0122] In one embodiment, a composition comprises a viral vector encoding a gene editing agent and at least one guide RNA (gRNA) wherein the gRNA is complementary to a target nucleic acid sequence of a virus gene sequence, a tumor gene sequence, a mutation in a disease or disorder, (e.g. sickle cell anemia) or any target sequence that the user may want to investigate and determine one or more mutations in the target sequence. In certain embodiments, a target nucleic acid sequence is in a coding region. In certain embodiments, the target sequence is in a non-coding sequence.

[0123] In certain embodiments, the gene editing agents comprise: Cre recombinases, CRISPR/Cas molecules, TALE transcriptional activators, Cas9 nucleases, nickases, transcriptional regulators, homologues, orthologs or combinations thereof. In one embodiment, the gene editing agent is a Clustered Regularly Interspaced Short Palindromic Repeated (CRISPR)-associated endonuclease, or homologues or orthologs thereof. In another embodiment, the CRISPR-associated endonuclease is Cas9 or homologues or orthologs, thereof.

[0124] In certain embodiments, the gene editing agent is a Clustered Regularly Interspaced Short Palindromic Repeated (CRISPR)-associated endonuclease, or homologues thereof. An example of a CRISPR-associated endonuclease is Cas9 or homologues or orthologs thereof.

[0125] In some embodiments, different gRNAs target different sequences within a target nucleic acid sequence. In some embodiments, the different gRNAs are complementary to different target sequences within a target gene. In some embodiments, a target sequence is within or near a target gene. In some embodiments, a region near a target gene comprises 1, 2, 3, 4.5, 10, 15, 20, 25, 30, or 35 base positions surrounding the target gene.

[0126] In some embodiments, a first guide nucleic acid of a plurality of guide nucleic acids is complementary to a first target sequence in or surrounding a target gene. In some embodiments, a second guide nucleic acid of the plurality of guide nucleic acids is complementary to a second target sequence in or surrounding a target gene. In some embodiments, a third guide nucleic acid of the plurality of guide nucleic acid is complementary to a third target sequence in or surrounding a target gene. In some embodiments, a fourth guide nucleic acid of the plurality of guide nucleic acid is complementary to a fourth target sequence in or surrounding a target gene. In some embodiments, the first target sequence, the second target sequence, the third target sequence, and the fourth target sequence are different.

[0127] In some embodiments, compositions and methods described herein comprise 2, 3, 4, 5, 6, or more than 6 different gRNAs that target (e.g., hybridize or anneal to) or are complementary to a region within or surrounding a target nucleic acid sequence.

[0128] In some embodiments, compositions and methods described herein comprise 2, 3, 4, 5, 6, or more than 6 different gRNAs that target a region within or surrounding a first target gene. In some embodiments, compositions and methods described herein comprise 2, 3, 4, 5, 6, or more than 6 different gRNAs that target a region within or surrounding a second target gene. In some embodiments, compositions and methods described herein comprise 2, 3, 4, 5, 6, or more than 6 different gRNAs that target a region within or surrounding a third target gene. In some embodiments, compositions and methods described herein comprise 2, 3, 4, 5, 6, or more than 6 different gRNAs that target a region within or surrounding a fourth target gene. In some embodiments, compositions and methods described herein comprise 2, 3, 4, 5, 6, or more than 6 different gRNAs that target a region within or surrounding a fifth, sixth or more target genes.

[0129] In some embodiments, a gRNA target sequence comprises a sequence at least or about 70%, 80%, 85%, 90%, 91%, 92%, 93%, 94%, 95%, 96%, 97%, 98%, 99%, or 100% sequence identity to a target nucleic acid sequence. In some embodiments, a gRNA target sequence comprises a sequence at least or about 70%, 80%, 85%, 90%, 91%, 92%, 93%, 94%, 95%, 96%, 97%, 98%, 99%, or 100% sequence identity to a sequence complementary to a target nucleic acid sequence. In some instances, a gRNA target sequence comprises a sequence at least or about 95% homology to a target nucleic acid sequence. In some instances, a gRNA target sequence comprises a sequence at least or about 95% homology to a sequence complementary to a target nucleic acid sequence. In some instances, a gRNA target sequence comprises a sequence at least or about 97% homology to a target nucleic acid sequence. In some instances, a gRNA target sequence comprises a sequence at least or about 97% homology to a sequence complementary to a target nucleic acid sequence. In some instances, a gRNA target sequence comprises a sequence at least or about 99% homology to a target nucleic acid sequence. In some instances, a gRNA target sequence comprises a sequence at least or about 99% homology to a sequence complementary to a target nucleic acid sequence. In some instances, a gRNA target sequence comprises a sequence at least or about 100% homology to a target nucleic acid sequence. In some instances, a gRNA target sequence comprises a sequence at least or about 100% homology to a sequence complementary to a target nucleic acid sequence.

[0130] In some embodiments, a gRNA target sequence comprises a sequence at least or about 70%, 80%, 85%, 90%, 91%, 92%, 93%, 94%, 95%, 96%, 97%, 98%, 99%, or 100% sequence identity to a target nucleic acid sequence in Tables 1, 2 or 4. In some embodiments, a gRNA target sequence comprises a sequence at least or about 70%, 80%, 85%, 90%, 91%, 92%, 93%, 94%, 95%, 96%, 97%, 98%, 99%, or 100% sequence identity to a sequence complementary to a target nucleic acid sequence in Tables 1, 2 or 4.

[0131] In certain embodiments, a viral vector comprises an adenovirus vector, an adeno-associated viral vector (AAV), or derivatives thereof. In some embodiments, the nucleic acids are configured to be packaged into an adeno-associated virus (AAV) vector. In some embodiments, the adeno-associated virus (AAV) vector is AAV2, AAV5, AAV6, AAV7, AAV8, or AAV9. In some embodiments, the adeno-associated virus (AAV) vector is AAV1, AAV2, AAV3, AAV4, AAV5, AAV6, AAV7, AAV8, AAV9, AAV10, AAV11, AAVDJ, or AAVDJ/8.

[0132] In another embodiment, an expression vector comprises an isolated nucleic acid encoding a gene editing agent and at least one guide RNA (gRNA) wherein the gRNA is complementary to a target nucleic acid sequence. In embodiments, the gene editing agents comprise: Cre recombinases, CRISPR/Cas molecules, TALE transcriptional activators, Cas9 nucleases, nickases, transcriptional regulators, homologues, orthologs or combinations thereof. In one embodiment, the gene editing agent is a Clustered Regularly Interspaced Short Palindromic Repeated (CRISPR)-associated endonuclease, or homologues or orthologs thereof. In another embodiment, the CRISPR-associated endonuclease is Cas9 or homologues or orthologs, thereof.

[0133] In some embodiments, the expression vector encodes a transactivating small RNA (tracrRNA) wherein the transactivating small RNA (tracrRNA) sequence is fused to the sequence encoding the guide RNA.

[0134] In another embodiment, the expression vector further comprises a sequence encoding a nuclear localization signal.

[0135] In some embodiments, the CRISPR-endonuclease is a Cas9 endonuclease, a Cas12 endonuclease, a CasX endonuclease, or a CasΦ endonuclease. In some embodiments, the CRISPR-endonuclease is a Cas9 nuclease. In some embodiments, the Cas9 nuclease is a Staphylococcus aureus Cas9 nuclease.

### Gene Editing Agents

[0136] Compositions of the disclosure include at least one gene editing agent, comprising CRISPR-associated nucleases such as Cas9 and Cas12a gRNAs, Argonaute family of endonucleases, clustered regularly interspaced short palindromic repeat (CRISPR) nucleases, zinc-finger nucleases (ZFNs), transcription activator-like effector nucleases (TALENs), meganucleases, other endo- or exo-nucleases, or combinations thereof.

[0137] In recent years, several systems for targeting endogenous genes have been developed including homing endonucleases (HE) or meganucleases, zinc finger nucleases (ZFN), transcription activator-like effector nucleases (TALEN) and most recently clustered regularly interspaced short palindromic repeats (CRISPR)-associated system 9 (Cas9) proteins which utilize site-specific double-strand DNA break (DSB)-mediated DNA repair mechanisms. These enzymes induce a precise and efficient genome cutting through DSB-mediated DNS repair mechanisms. These DSB-mediated genome editing techniques enable target gene deletion, insertion, or modification.

[0138] In the past years, ZFNs and TALENs have revolutionized genome editing. The major drawbacks for ZFNs and TALENs are the uncontrollable off-target effects and the tedious and expensive engineering of custom DNA-binding fusion protein for each target site, which limit the universal application and clinical safety.

[0139] CRISPR (Clustered Regularly Interspaced Short Palindromic Repeats) is found in bacteria and is believed to protect the bacteria from phage infection. It has recently been used as a means to alter gene expression in eukaryotic DNA, but has not been proposed as an anti-viral therapy or more broadly as a way to disrupt genomic material. Rather, it has been used to introduce insertions or deletions as a way of increasing or decreasing transcription in the DNA of a targeted cell or population of cells. See for example, Horvath et al., Science (2010) 327:167-170; Terns et al., Current Opinion in Microbiology (2011) 14:321-327; Bhaya et al., Annu Rev Genet (2011) 45:273-297; Wiedenheft et al., Nature (2012) 482:331-338); Jinek M et al., Science (2012) 337:816-821; Cong L et al., Science (2013) 339:819-823; Jinek M et al., (2013) eLife 2:e00471; Mali P et al. (2013) Science 339:823-826; Qi L S et al. (2013) Cell 152:1173-1183; Gilbert L A et al. (2013) Cell 154:442-451; Yang H et al. (2013) Cell 154:1370-1379; and Wang H et al. (2013) Cell 153:910-918).

[0140] CRISPR methodologies employ a nuclease, CRISPR-associated (Cas), that complexes with small RNAs as guides (gRNAs) to cleave DNA in a sequence-specific manner upstream of the protospacer adjacent motif (PAM) in any genomic location. CRISPR may use separate guide RNAs known as the crRNA and tracrRNA. These two separate RNAs have been combined into a single RNA to enable site-specific mammalian genome cutting through the design of a short guide RNA. Cas and guide RNA (gRNA) may be synthesized by known methods. Cas/guide-RNA (gRNA) uses a non-specific DNA cleavage protein Cas, and an RNA oligonucleotide to hybridize to target and recruit the Cas/gRNA complex. See Chang et al., 2013, Cell Res. 23:465-472; Hwang et al., 2013, Nat. Biotechnol. 31:227-229; Xiao et al., 2013, Nucl. Acids Res. 1-11.

[0141] In general, the CRISPR/Cas proteins comprise at least one RNA recognition and/or RNA binding domain. RNA recognition and/or RNA binding domains interact with guide RNAs. CRISPR/Cas proteins can also comprise nuclease domains (i.e., DNase or RNase domains), DNA binding domains, helicase domains, RNase domains, protein-protein interaction domains, dimerization domains, as well as other domains. The mutation can comprise one or more deletions. The mutation can comprise one or more point mutations, that is, the replacement of a single nucleotide with another nucleotide. Useful point mutations are those that have functional consequences, for example, mutations that result in the conversion of an amino acid codon into a termination codon, or that result in the production of a nonfunctional protein.

[0142] CRISPR methodologies employ a nuclease, CRISPR-associated (Cas), that complexes with small RNAs as guides (gRNAs) to cleave DNA in a sequence-specific manner upstream of the protospacer adjacent motif (PAM) in any genomic location. CRISPR may use separate guide RNAs known as the crRNA and tracrRNA. These two separate RNAs have been combined into a single RNA to enable site-specific mammalian genome cutting through the design of a short guide RNA. Cas and guide RNA (gRNA) may be synthesized by known methods. Cas/guide-RNA (gRNA) uses a non-specific DNA cleavage protein Cas, and an RNA oligonucleotide to hybridize to target and recruit the Cas/gRNA complex. See Chang et al., 2013, Cell Res. 23:465-472; Hwang et al., 2013, Nat. Biotechnol. 31:227-229; Xiao et al., 2013, Nucl. Acids Res. 1-11.

[0143] The RNA-guided Cas9 biotechnology induces genome editing without detectable off-target effects. This technique takes advantage of the genome defense mechanisms in bacteria that CRISPR/Cas loci encode RNA-guided adaptive immune systems against mobile genetic elements (viruses, transposable elements and conjugative plasmids). Three types (I-III) of CRISPR systems have been identified. CRISPR clusters contain spacers, the sequences complementary to antecedent mobile elements. CRISPR clusters are transcribed and processed into mature CRISPR (Clustered Regularly Interspaced Short Palindromic Repeats) RNA (crRNA). Cas9 belongs to the type II CRISPR/Cas system and has strong endonuclease activity to cut target DNA.

[0144] In certain embodiments, the CRISPR/Cas-like protein can be a wild type CRISPR/Cas protein, a modified CRISPR/Cas protein, or a fragment of a wild type or modified CRISPR/Cas protein. The CRISPR/Cas-like protein can be modified to increase nucleic acid binding affinity and/or specificity, alter an enzymatic activity, and/or change another property of the protein. For example, nuclease (i.e., DNase, RNase) domains of the CRISPR/Cas-like protein can be modified, deleted, or inactivated. Alternatively, the CRISPR/Cas-like protein can be truncated to remove domains that are not essential for the function of the fusion protein. The CRISPR/Cas-like protein can also be truncated or modified to optimize the activity of the effector domain of the fusion protein.

[0145] In some embodiments, the CRISPR/Cas-like protein can be derived from a wild type Cas9 protein or fragment thereof. In other embodiments, the CRISPR/Cas-like protein can be derived from modified Cas9 protein. For example, the amino acid sequence of the Cas9 protein can be modified to alter one or more properties (e.g., nuclease activity, affinity, stability, etc.) of the protein. Alternatively, domains of the Cas9 protein not involved in RNA-guided cleavage can be eliminated from the protein such that the modified Cas9 protein is smaller than the wild type Cas9 protein.

[0146] In one embodiment, the RNA-guided endonuclease is derived from a type II CRISPR/Cas system. The CRISPR-associated endonuclease, Cas9, belongs to the type II CRISPR/Cas system and has strong endonuclease activity to cut target DNA. Cas9 is guided by a mature crRNA that contains about 20 base pairs (bp) of unique target sequence (called spacer) and a trans-activated small RNA (tracrRNA) that serves as a guide for ribonuclease III-aided processing of pre-crRNA. The crRNA:tracrRNA duplex directs Cas9 to target DNA via complementary base pairing between the spacer on the crRNA and the complementary sequence (called protospacer) on the target DNA. Cas9 recognizes a trinucleotide (NGG) protospacer adjacent motif (PAM) to specify the cut site (the 3rd nucleotide from PAM). The crRNA and tracrRNA can be expressed separately or engineered into an artificial fusion small guide RNA (sgRNA) via a synthetic stem loop (AGAAAU) to mimic the natural crRNA/tracrRNA duplex. Such sgRNA, like shRNA, can be synthesized or in vitro transcribed for direct RNA transfection or expressed from U6 or H1-promoted RNA expression vector, although cleavage efficiencies of the artificial sgRNA are lower than those for systems with the crRNA and tracrRNA expressed separately. Therefore, the Cas9 gRNA technology requires the expression of the Cas9 protein and gRNA, which then form a gene editing complex at the specific target DNA binding site within the target genome and inflict cleavage/mutation of the target DNA.

[0147] However, the present disclosure is not limited to the use of Cas9-mediated gene editing. Rather, the present disclosure encompasses the use of other CRISPR-associated peptides, which can be targeted to a targeted sequence using a gRNA and can edit to target site of interest. For example, in some embodiments, the disclosure utilizes Cas12a (also known as Cpf1) to edit the target site of interest.

[0148] Engineered CRISPR systems generally contain two components: a guide RNA (gRNA or sgRNA) and a CRISPR-associated endonuclease (Cas protein). In nature, CRISPR/CRISPR-associated (Cas) systems provide bacteria and archaea with adaptive immunity against viruses and plasmids by using CRISPR RNAs (crRNAs) to guide the silencing of invading nucleic acids.

[0149] The CRISPR-Cas is a RNA-mediated adaptive defense system that relies on small RNA molecules for sequence-specific detection and silencing of foreign nucleic acids. CRISPR/Cas systems are composed of cas genes organized in operon(s) and CRISPR array(s) consisting of genome-targeting sequences (called spacers).

[0150] As described herein, CRISPR-Cas systems generally refer to an enzyme system that includes a guide RNA sequence that contains a nucleotide sequence complementary or substantially complementary to a region of a target polynucleotide, and a protein with nuclease activity. CRISPR-Cas systems include Type I CRISPR-Cas system, Type II CRISPR-Cas system, Type III CRISPR-Cas system, and derivatives thereof. CRISPR-Cas systems include engineered and/or programmed nuclease systems derived from naturally accruing CRISPR-Cas systems. In certain embodiments, CRISPR-Cas systems contain engineered and/or mutated Cas proteins. In some embodiments, nucleases generally refer to enzymes capable of cleaving the phosphodiester bonds between the nucleotide subunits of nucleic acids. In some embodiments, endonucleases are generally capable of cleaving the phosphodiester bond within a polynucleotide chain. Nickases refer to endonucleases that cleave only a single strand of a DNA duplex.

[0151] In some embodiments, the CRISPR/Cas system used herein can be a type I, a type II, or a type III system. Non-limiting examples of suitable CRISPR/Cas proteins include Cas3, Cas4, Cas5, Cas5e (or CasD), Cas6, Cas6e, Cas6f, Cas7, Cas8a1, Cas8a2, Cas8b, Cas8c, Cas9, Cas10, Cas10d, CasF, CasG, CasH, CasX, CasΦ, Csy1, Csy2, Csy3, Cse1 (or CasA), Cse2 (or CasB), Cse3 (or CasE), Cse4 (or CasC), Csc1, Csc2, Csa5, Csn2, Csm2, Csm3, Csm4, Csm5, Csm6, Cmr1, Cmr3, Cmr4, Cmr5, Cmr6, Csb1, Csb2, Csb3, Csx17, Csx14, Csx10, Csx16, CsaX, Csx3, Csz1, Csx15, Csf1, Csf2, Csf3, Csf4, and Cu1966. By way of further example, in some embodiments, the CRISPR-Cas protein is a Cas1, Cas1B, Cas2, Cas3, Cas4, Cas5, Cash, Cas7, Cas8, Cas10, Csy1, Csy2, Csy3, Cse1, Cse2, Csc1, Csc2, Csa5, Csn2, Csm2, Csm3, Csm4, Csm5, Csm6, Cmr1, Cmr3, Cmr4, Cmr5, Cmr6, Csb1, Csb2, Csb3, Csx17, Csx14, Csx16, CsaX, Csx3, Csx1, Csx15, Csf1, Csf2, Csf3, Csf4, Cas9, Cas12 (e.g., Cas12a, Cas12b, Cas12c, Cas12d, Cas12k, Cas12j/CasΦ, Cas12L etc.), Cas13 (e.g., Cas13a, Cas13b (such as Cas13b-t1, Cas13b-t2, Cas13b-t3), Cas13c, Cas13d, etc.), Cas14, CasX, CasY, or an engineered form of the Cas protein. In some embodiments, the CRISPR/Cas protein or endonuclease is Cas9. In some embodiments, the CRISPR/Cas protein or endonuclease is Cas12. In certain embodiments, the Cas12 polypeptide is Cas12a, Cas12b, Cas12c, Cas12d, Cas12e, Cas12g, Cas12h, Cas12i, Cas12L or Cas12J. In some embodiments, the CRISPR/Cas protein or endonuclease is CasX. In some embodiments, the CRISPR/Cas protein or endonuclease is CasY. In some embodiments, the CRISPR/Cas protein or endonuclease is CasΦ.

[0152] In some embodiments, the Cas9 protein can be from or derived from: Staphylococcus aureus, Streptococcus pyogenes, Streptococcus thermophilus, Streptococcus sp., Nocardiopsis dassonvillei, Streptomyces pristinaespiralis, Streptomyces viridochromogenes, Streptomyces viridochromogenes, Streptosporangium roseum, Alicyclobacillus acidocaldarius, Bacillus pseudomycoides, Bacillus selenitireducens, Exiguobacterium sibiricum, Lactobacillus delbrueckii, Lactobacillus salivarius, Microscilla marina, Burkholderiales bacterium, Polaromonas naphthalenivorans, Polaromonas sp., Crocosphaera watsonii, Cyanothece sp., Microcystis aeruginosa, Synechococcus sp., Acetohalobium arabaticum, Ammonifex degensii, Caldicelulosiruptor becscii, Candidatus Desulforudis, Clostridium botulinum, Clostridium difficile, Fine goldia magna, Natranaerobius thermophilus, Pelotomaculum thermopropionicum, Acidithiobacillus caldus, Acidithiobacillus ferrooxidans, Allochromatium vinosum, Marinobacter sp., Nitrosococcus halophilus, Nitrosococcus watsoni, Pseudoalteromonas haloplanktis, Ktedonobacter racemifer, Methanohalobium evestigatum, Anabaena variabilis, Nodularia spumigena, Nostoc sp., Arthrospira maxima, Arthrospira platensis, Arthrospira sp., Lyngbya sp., Microcoleus chthonoplastes, Oscillatoria sp., Petrotoga mobilis, Thermosipho africanus, or Acaryochloris marina.

[0153] In some embodiments, the composition comprises a CRISPR-associated (Cas) protein, or functional fragment or derivative thereof. In some embodiments, the Cas protein is an endonuclease, including but not limited to the Cas9 nuclease. In some embodiments, the Cas9 protein comprises an amino acid sequence identical to the wild type Streptococcus pyogenes or Staphylococcus aureus Cas9 amino acid sequence. In some embodiments, the Cas protein comprises the amino acid sequence of a Cas protein from other species, for example other Streptococcus species, such as thermophilus; Pseudomonas aeruginosa, Escherichia coli, or other sequenced bacteria genomes and archaea, or other prokaryotic microorganisms. Other Cas proteins, useful for the present disclosure, known or can be identified, using methods known in the art (see e.g., Esvelt et al., 2013, Nature Methods, 10: 1116-1121). In some embodiments, the Cas protein comprises a modified amino acid sequence, as compared to its natural source. CRISPR/Cas proteins comprise at least one RNA recognition and/or RNA binding domain. RNA recognition and/or RNA binding domains interact with guide RNAs (gRNAs). CRISPR/Cas proteins can also comprise nuclease domains (i.e., DNase or RNase domains), DNA binding domains, helicase domains, RNAse domains, protein-protein interaction domains, dimerization domains, as well as other domains.

[0154] The CRISPR/Cas-like protein can be a wild type CRISPR/Cas protein, a modified CRISPR/Cas protein, or a fragment of a wild type or modified CRISPR/Cas protein. The CRISPR/Cas-like protein can be modified to increase nucleic acid binding affinity and/or specificity, alter an enzymatic activity, and/or change another property of the protein. For example, nuclease (i.e., DNase, RNase) domains of the CRISPR/Cas-like protein can be modified, deleted, or inactivated. Alternatively, the CRISPR/Cas-like protein can be truncated to remove domains that are not essential for the function of the Cas protein. The CRISPR/Cas-like protein can also be truncated or modified to optimize the activity of the effector domain of the Cas protein.

[0155] In some embodiments, the CRISPR/Cas-like protein can be derived from a wild type Cas protein or fragment thereof. In some embodiments, the CRISPR/Cas-like protein is a modified Cas9 protein. For example, the amino acid sequence of the Cas9 protein can be modified to alter one or more properties (e.g., nuclease activity, affinity, stability, etc.) of the protein relative to wild-type or another Cas protein. Alternatively, domains of the Cas9 protein not involved in RNA-guided cleavage can be eliminated from the protein such that the modified Cas9 protein is smaller than the wild-type Cas9 protein.

[0156] The disclosed CRISPR-Cas compositions should also be construed to include any form of a protein having substantial homology to a Cas protein (e.g., Cas9, saCas9, Cas9 protein) disclosed herein. In some embodiments, a protein which is “substantially homologous” is about 50% homologous, about 70% homologous, about 80% homologous, about 90% homologous, about 95% homologous, or about 99% homologous to amino acid sequence of a Cas protein disclosed herein. The Cas9 can be an orthologous. Six smaller Cas9 orthologues have been used and reports have shown that Cas9 from Staphylococcus aureus (SaCas9) can edit the genome with efficiencies similar to those of SpCas9, while being more than 1 kilobase shorter.

[0157] In some embodiments, the composition comprises a CRISPR-associated (Cas) peptide, or functional fragment or derivative thereof. In certain embodiments, the Cas peptide is an endonuclease, including but not limited to the Cas9 nuclease. In some embodiments, the Cas9 peptide comprises an amino acid sequence identical to the wild type Streptococcus pyogenes Cas9 amino acid sequence. In some embodiments, the Cas peptide may comprise the amino acid sequence of a Cas protein from other species, for example other Streptococcus species, such as thermophilus; Pseudomonas aeruginosa, Escherichia coli, or other sequenced bacteria genomes and archaea, or other prokaryotic microorganisms. Other Cas peptides, useful for the present disclosure, known or can be identified, using methods known in the art (see e.g., Esvelt et al., 2013, Nature Methods, 10: 1116-1121). In certain embodiments, the Cas peptide may comprise a modified amino acid sequence, as compared to its natural source. For example, in some embodiments, the wild type Streptococcus pyogenes Cas9 sequence can be modified. In certain embodiments, the amino acid sequence can be codon optimized for efficient expression in human cells (i.e., “humanized) or in a species of interest. A humanized Cas9 nuclease sequence can be for example, the Cas9 nuclease sequence encoded by any of the expression vectors listed in Genbank accession numbers KM099231.1 GL669193757; KM099232.1 GL669193761; or KM099233.1 GL669193765. Alternatively, the Cas9 nuclease sequence can be for example, the sequence contained within a commercially available vector such as PX330 or PX260 from Addgene (Cambridge, MA). In some embodiments, the Cas9 endonuclease can have an amino acid sequence that is a variant or a fragment of any of the Cas9 endonuclease sequences of Genbank accession numbers KM099231.1 GL669193757; KM099232.1 GL669193761; or KM099233.1 GL669193765 or Cas9 amino acid sequence of PX330 or PX260 (Addgene, Cambridge, MA).

[0158] The Cas9 nucleotide sequence can be modified to encode biologically active variants of Cas9, and these variants can have or can include, for example, an amino acid sequence that differs from a wild type Cas9 by virtue of containing one or more mutations (e.g., an addition, deletion, or substitution mutation or a combination of such mutations). One or more of the substitution mutations can be a substitution (e.g., a conservative amino acid substitution).

[0159] In certain embodiments, the Cas peptide is a mutant Cas9, wherein the mutant Cas9 reduces the off-target effects, as compared to wild-type Cas9. In some embodiments, the mutant Cas9 is a Streptococcus pyogenes Cas9 (SpCas9) variant.

[0160] In some embodiments, SpCas9 variants comprise one or more point mutations, including, but not limited to R780A, K810A, K848A, K855A, H982A, K1003A, and R1060A (Slaymaker et al., 2016, Science, 351(6268): 84-88). In some embodiments, SpCas9 variants comprise D1135E point mutation (Kleinstiver et al., 2015, Nature, 523(7561): 481-485). In some embodiments, SpCas9 variants comprise one or more point mutations, including, but not limited to N497A, R661A, Q695A, Q926A, D1135E, L169A, and Y450A (Kleinstiver et al., 2016, Nature, doi:10.1038/nature16526). In some embodiments, SpCas9 variants comprise one or more point mutations, including but not limited to M495A, M694A, and M698A. Y450 is involved with hydrophobic base pair stacking. N497, R661, Q695, Q926 are involved with residue to base hydrogen bonding contributing to off-target effects. N497 hydrogen bonding through peptide backbone. L169A is involved with hydrophobic base pair stacking. M495A, M694A, and H698A are involved with hydrophobic base pair stacking.

[0161] In some embodiments, SpCas9 variants comprise one or more point mutations at one or more of the following residues: R780, K810, K848, K855, H982, K1003, R1060, D1135, N497, R661, Q695, Q926, L169, Y450, M495, M694, and M698. In some embodiments, SpCas9 variants comprise one or more point mutations selected from the group of: R780A, K810A, K848A, K855A, H982A, K1003A, R1060A, D1135E, N497A, R661A, Q695A, Q926A, L169A, Y450A, M495A, M694A, and M698A.

[0162] In some embodiments, the SpCas9 variant comprises the point mutations, relative to wildtype SpCas9, of N497A, R661A, Q695A, and Q926A. In some embodiments, the SpCas9 variant comprises the point mutations, relative to wildtype SpCas9, of N497A, R661A, Q695A, Q926A, and D1135E. In some embodiments, the SpCas9 variant comprises the point mutations, relative to wildtype SpCas9, of N497A, R661A, Q695A, Q926A, and L169A. In some embodiments, the SpCas9 variant comprises the point mutations, relative to wildtype SpCas9, of N497A, R661A, Q695A, Q926A, and Y450A. In some embodiments, the SpCas9 variant comprises the point mutations, relative to wildtype SpCas9, of N497A, R661A, Q695A, Q926A, and M495A. In some embodiments, the SpCas9 variant comprises the point mutations, relative to wildtype SpCas9, of N497A, R661A, Q695A, Q926A, and M694A. In some embodiments, the SpCas9 variant comprises the point mutations, relative to wildtype SpCas9, of N497A, R661A, Q695A, Q926A, and H698A. In some embodiments, the SpCas9 variant comprises the point mutations, relative to wildtype SpCas9, of N497A, R661A, Q695A, Q926A, D1135E, and L169A. In some embodiments, the SpCas9 variant comprises the point mutations, relative to wildtype SpCas9, of N497A, R661A, Q695A, Q926A, D1135E, and Y450A. In some embodiments, the SpCas9 variant comprises the point mutations, relative to wildtype SpCas9, of N497A, R661A, Q695A, Q926A, D1135E, and M495A. In some embodiments, the SpCas9 variant comprises the point mutations, relative to wildtype SpCas9, of N497A, R661A, Q695A, Q926A, D1135E, and M694A. In some embodiments, the SpCas9 variant comprises the point mutations, relative to wildtype SpCas9, of N497A, R661A, Q695A, Q926A, D1135E, and M698A.

[0163] In some embodiments, the SpCas9 variant comprises the point mutations, relative to wildtype SpCas9, of R661A, Q695A, and Q926A. In some embodiments, the SpCas9 variant comprises the point mutations, relative to wildtype SpCas9, of R661A, Q695A, Q926A, and D1135E. In some embodiments, the SpCas9 variant comprises the point mutations, relative to wildtype SpCas9, of R661A, Q695A, Q926A, and L169A. In some embodiments, the SpCas9 variant comprises the point mutations, relative to wildtype SpCas9, of R661A, Q695A, Q926A, and Y450A. In some embodiments, the SpCas9 variant comprises the point mutations, relative to wildtype SpCas9, of R661A, Q695A, Q926A, and M495A. In some embodiments, the SpCas9 variant comprises the point mutations, relative to wildtype SpCas9, of R661A, Q695A, Q926A, and M694A. In some embodiments, the SpCas9 variant comprises the point mutations, relative to wildtype SpCas9, of R661A, Q695A, Q926A, and H698A. In some embodiments, the SpCas9 variant comprises the point mutations, relative to wildtype SpCas9, of R661A, Q695A, Q926A, D1135E, and L169A. In some embodiments, the SpCas9 variant comprises the point mutations, relative to wildtype SpCas9, of R661A, Q695A, Q926A, D1135E, and Y450A. In some embodiments, the SpCas9 variant comprises the point mutations, relative to wildtype SpCas9, of R661A, Q695A, Q926A, D1135E, and M495A. In some embodiments, the SpCas9 variant comprises the point mutations, relative to wildtype SpCas9, of R661A, Q695A, Q926A, D1135E, and M694A. In some embodiments, the SpCas9 variant comprises the point mutations, relative to wildtype SpCas9, of R661A, Q695A, Q926A, D1135E, and M698A.

[0164] In some embodiments, the mutant Cas9 comprises one or more mutations that alter PAM specificity (Kleinstiver et al., 2015, Nature, 523(7561):481-485; Kleinstiver et al., 2015, Nat Biotechnol, 33(12): 1293-1298). In some embodiments, the mutant Cas9 comprises one or more mutations that alter the catalytic activity of Cas9, including but not limited to D10A in RuvC and H840A in HNH (Cong et al., 2013; Science 339: 919-823, Gasiubas et al., 2012; PNAS 109:E2579-2586 Jinek et al., 2012; Science 337: 816-821).

[0165] In addition to the wild type and variant Cas9 endonucleases described, embodiments of the disclosure also encompass CRISPR systems including newly developed “enhanced-specificity” S. pyogenes Cas9 variants (eSpCas9), which dramatically reduce off target cleavage. These variants are engineered with alanine substitutions to neutralize positively charged sites in a groove that interacts with the non-target strand of DNA. This aim of this modification is to reduce interaction of Cas9 with the non-target strand, thereby encouraging re-hybridization between target and non-target strands. The effect of this modification is a requirement for more stringent Watson-Crick pairing between the gRNA and the target DNA strand, which limits off-target cleavage (Slaymaker, I. M. et al. (2015) DOI:10.1126/science.aad5227).

[0166] In certain embodiments, three variants found to have the best cleavage efficiency and fewest off-target effects: SpCas9 (K855A), SpCas9 (K810A/K1003A/R1060A) (a.k.a. eSpCas9 1.0), and SpCas9(K848A/K1003A/R1060A) (a.k.a. eSPCas9 1.1) are employed in the compositions. The disclosure is by no means limited to these variants, and also encompasses all Cas9 variants (Slaymaker, I. M. et al. (2015)). The present disclosure also includes another type of enhanced specificity Cas9 variant, “high fidelity” spCas9 variants (HF-Cas9). Examples of high fidelity variants include SpCas9-HF1 (N497A/R661A/Q695A/Q926A), SpCas9-HF2 (N497A/R661A/Q695A/Q926A/D1135E), SpCas9-HF3 (N497A/R661A/Q695A/Q926A/L169A), SpCas9-HF4 (N497A/R661A/Q695A/Q926A/Y450A). Also included are all SpCas9 variants bearing all possible single, double, triple and quadruple combinations of N497A, R661A, Q695A, Q926A or any other substitutions (Kleinstiver, B. P. et al., 2016, Nature. DOI: 10.1038/nature16526).

[0167] Accordingly, in certain embodiments, a Cas9 variant comprises a human-optimized Cas9; a nickase mutant Cas9; saCas9; enhanced-fidelity SaCas9 (efSaCas9); SpCas9(K855a); SpCas9(K810A/K1003A/r1060A); SpCas9(K848A/K1003A/R1060A); SpCas9 N497A, R661A, Q695A, Q926A; SpCas9 N497A, R661A, Q695A, Q926A, D1135E; SpCas9 N497A, R661A, Q695A, Q926A L169A; SpCas9 N497A, R661A, Q695A, Q926A Y450A; SpCas9 N497A, R661A, Q695A, Q926A M495A; SpCas9 N497A, R661A, Q695A, Q926A M694A; SpCas9 N497A, R661A, Q695A, Q926A H698A; SpCas9 N497A, R661A, Q695A, Q926A, D1135E, L169A; SpCas9 N497A, R661A, Q695A, Q926A, D1135E, Y450A; SpCas9 N497A, R661A, Q695A, Q926A, D1135E, M495A; SpCas9 N497A, R661A, Q695A, Q926A, D1135E, M694A; SpCas9 N497A, R661A, Q695A, Q926A, D1135E, M698A; SpCas9 R661A, Q695A, Q926A; SpCas9 R661A, Q695A, Q926A, D1135E; SpCas9 R661A, Q695A, Q926A, L169A; SpCas9 R661A, Q695A, Q926A Y450A; SpCas9 R661A, Q695A, Q926A M495A; SpCas9 R661A, Q695A, Q926A M694A; SpCas9 R661A, Q695A, Q926A H698A; SpCas9 R661A, Q695A, Q926A D1135E L169A; SpCas9 R661A, Q695A, Q926A D1135E Y450A; SpCas9 R661A, Q695A, Q926A D1135E M495A; or SpCas9 R661A, Q695A, Q926A, D1135E or M694A.

[0168] As used herein, the term “Cas” is meant to include all Cas molecules comprising variants, mutants, orthologues, high-fidelity variants and the like.

[0169] However, the present disclosure is not limited to the use of Cas9-mediated gene editing. Rather, the present disclosure encompasses the use of other CRISPR-associated peptides, which can be targeted to a targeted sequence using a gRNA and can edit to target site of interest. For example, in some embodiments, the disclosure utilizes Cpf1 to edit the target site of interest. Cpf1 is a single crRNA-guided, class 2 CRISPR effector protein which can effectively edit target DNA sequences in human cells. Exemplary Cpf1 includes, but is not limited to, Acidaminococcus sp. Cpf1 (AsCpf1) and Lachnospiraceae bacterium Cpf1 (LbCpf1).

[0170] The disclosure should also be construed to include any form of a peptide having substantial homology to a Cas peptide (e.g., Cas9) disclosed herein. Preferably, a peptide which is “substantially homologous” is about 50% homologous, more preferably about 70% homologous, even more preferably about 80% homologous, more preferably about 90% homologous, even more preferably, about 95% homologous, and even more preferably about 99% homologous to amino acid sequence of a Cas peptide disclosed herein.

[0171] The peptide may alternatively be made by recombinant means or by cleavage from a longer polypeptide. The composition of a peptide may be confirmed by amino acid analysis or sequencing.

[0172] The variants of the peptides according to the present disclosure may be (i) one in which one or more of the amino acid residues are substituted with a conserved or non-conserved amino acid residue (preferably a conserved amino acid residue) and such substituted amino acid residue may or may not be one encoded by the genetic code, (ii) one in which there are one or more modified amino acid residues, e.g., residues that are modified by the attachment of substituent groups, (iii) one in which the peptide is an alternative splice variant of the peptide of the present disclosure, (iv) fragments of the peptides and/or (v) one in which the peptide is fused with another peptide, such as a leader or secretory sequence or a sequence which is employed for purification (for example, His-tag) or for detection (for example, Sv5 epitope tag). The fragments include peptides generated via proteolytic cleavage (including multi-site proteolysis) of an original sequence. Variants may be post-translationally, or chemically modified. Such variants are deemed to be within the scope of those skilled in the art from the teaching herein.

[0173] As known in the art the “similarity” between two peptides is determined by comparing the amino acid sequence and its conserved amino acid substitutes of one polypeptide to a sequence of a second polypeptide. Variants are defined to include peptide sequences different from the original sequence, preferably different from the original sequence in less than 40% of residues per segment of interest, more preferably different from the original sequence in less than 25% of residues per segment of interest, more preferably different by less than 10% of residues per segment of interest, most preferably different from the original protein sequence in just a few residues per segment of interest and at the same time sufficiently homologous to the original sequence to preserve the functionality of the original sequence. The present disclosure includes amino acid sequences that are at least 60%, 65%, 70%, 72%, 74%, 76%, 78%, 80%, 90%, or 95% similar or identical to the original amino acid sequence. The degree of identity between two peptides is determined using computer algorithms and methods that are widely known for the persons skilled in the art. The identity between two amino acid sequences is preferably determined by using the BLASTP algorithm [BLAST Manual, Altschul, S., et al., NCBI NLM NIH Bethesda, Md. 20894, Altschul, S., et al., J. Mol. Biol. 215: 403-410 (1990)].

[0174] The peptides of the disclosure can be post-translationally modified. For example, post-translational modifications that fall within the scope of the present disclosure include signal peptide cleavage, glycosylation, acetylation, isoprenylation, proteolysis, myristylation, protein folding and proteolytic processing, etc. Some modifications or processing events require introduction of additional biological machinery. For example, processing events, such as signal peptide cleavage and core glycosylation, are examined by adding canine microsomal membranes or Xenopus egg extracts (U.S. Pat. No. 6,103,489) to a standard translation reaction.

[0175] The peptides of the disclosure may include unnatural amino acids formed by post-translational modification or by introducing unnatural amino acids during translation. A variety of approaches are available for introducing unnatural amino acids during protein translation.

[0176] A peptide or protein of the disclosure may be conjugated with other molecules, such as proteins, to prepare fusion proteins. This may be accomplished, for example, by the synthesis of N-terminal or C-terminal fusion proteins provided that the resulting fusion protein retains the functionality of the Cas peptide.

[0177] A peptide or protein of the disclosure may be phosphorylated using conventional methods such as the method described in Reedijk et al. (The EMBO Journal 11(4):1365, 1992).

[0178] Cyclic derivatives of the peptides of the disclosure are also part of the present disclosure. Cyclization may allow the peptide to assume a more favorable conformation for association with other molecules. Cyclization may be achieved using techniques known in the art. For example, disulfide bonds may be formed between two appropriately spaced components having free sulfhydryl groups, or an amide bond may be formed between an amino group of one component and a carboxyl group of another component. Cyclization may also be achieved using an azobenzene-containing amino acid as described by Ulysse, L., et al., J. Am. Chem. Soc. 1995, 117, 8466-8467. The components that form the bonds may be side chains of amino acids, non-amino acid components or a combination of the two. In an embodiment of the disclosure, cyclic peptides may comprise a beta-turn in the right position. Beta-turns may be introduced into the peptides of the disclosure by adding the amino acids Pro-Gly at the right position.

[0179] It may be desirable to produce a cyclic peptide which is more flexible than the cyclic peptides containing peptide bond linkages as described above. A more flexible peptide may be prepared by introducing cysteines at the right and left position of the peptide and forming a disulfide bridge between the two cysteines. The two cysteines are arranged so as not to deform the beta-sheet and turn. The peptide is more flexible as a result of the length of the disulfide linkage and the smaller number of hydrogen bonds in the beta-sheet portion. The relative flexibility of a cyclic peptide can be determined by molecular dynamics simulations.

[0180] The disclosure also relates to peptides comprising a Cas peptide fused to, or integrated into, a target protein, and/or a targeting domain capable of directing the chimeric protein to a desired cellular component or cell type or tissue. The chimeric proteins may also contain additional amino acid sequences or domains. The chimeric proteins are recombinant in the sense that the various components are from different sources, and as such are not found together in nature (i.e. are heterologous).

[0181] In some embodiments, the targeting domain can be a membrane spanning domain, a membrane binding domain, or a sequence directing the protein to associate with for example vesicles or with the nucleus. In some embodiments, the targeting domain can target a peptide to a particular cell type or tissue. For example, the targeting domain can be a cell surface ligand or an antibody against cell surface antigens of a target tissue (e.g. cancerous tissue). A targeting domain may target the peptide of the disclosure to a cellular component. In certain embodiments, the targeting domain targets a tumor-specific antigen or tumor-associated antigen.

[0182] N-terminal or C-terminal fusion proteins comprising a peptide or chimeric protein of the disclosure conjugated with other molecules may be prepared by fusing, through recombinant techniques, the N-terminal or C-terminal of the peptide or chimeric protein, and the sequence of a selected protein or selectable marker with a desired biological function. The resultant fusion proteins contain the Cas peptide or chimeric protein fused to the selected protein or marker protein as described herein. Examples of proteins which may be used to prepare fusion proteins include immunoglobulins, glutathione-S-transferase (GST), hemagglutinin (HA), and truncated myc.

[0183] A peptide of the disclosure may be synthesized by conventional techniques. For example, the peptides of the disclosure may be synthesized by chemical synthesis using solid phase peptide synthesis. These methods employ either solid or solution phase synthesis methods (see for example, J. M. Stewart, and J. D. Young, Solid Phase Peptide Synthesis, 2^{nd} Ed., Pierce Chemical Co., Rockford Ill. (1984) and G. Barany and R. B. Merrifield, The Peptides: Analysis Synthesis, Biology editors E. Gross and J. Meienhofer Vol. 2 Academic Press, New York, 1980, pp. 3-254 for solid phase synthesis techniques; and M Bodansky, Principles of Peptide Synthesis, Springer-Verlag, Berlin 1984, and E. Gross and J. Meienhofer, Eds., The Peptides: Analysis, Synthesis, Biology, supra, Vol 1, for classical solution synthesis.).

[0184] A peptide of the disclosure may be prepared by standard chemical or biological means of peptide synthesis. Biological methods include, without limitation, expression of a nucleic acid encoding a peptide in a host cell or in an in vitro translation system.

[0185] Biological preparation of a peptide of the disclosure involves expression of a nucleic acid encoding a desired peptide. An expression cassette comprising such a coding sequence may be used to produce a desired peptide. For example, subclones of a nucleic acid sequence encoding a peptide of the disclosure can be produced using conventional molecular genetic manipulation for subcloning gene fragments, such as described by Sambrook et al., Molecular Cloning: A Laboratory Manual, Cold Springs Laboratory, Cold Springs Harbor, New York (2012), and Ausubel et al. (ed.), Current Protocols in Molecular Biology, John Wiley & Sons (New York, NY) (1999 and preceding editions), each of which is hereby incorporated by reference in its entirety. The subclones then are expressed in vitro or in vivo in bacterial cells to yield a smaller protein or polypeptide that can be tested for a particular activity.

[0186] In the context of an expression vector, the vector can be readily introduced into a host cell, e.g., mammalian, bacterial, yeast or insect cell by any method in the art. Coding sequences for a desired peptide of the disclosure may be codon optimized based on the codon usage of the intended host cell in order to improve expression efficiency as demonstrated herein. Codon usage patterns can be found in the literature (Nakamura et al., 2000, Nuc Acids Res. 28:292). Representative examples of appropriate hosts include bacterial cells, such as streptococci, staphylococci, E. coli, Streptomyces and Bacillus subtilis cells; fungal cells, such as yeast cells and Aspergillus cells; insect cells such as Drosophila S2 and Spodoptera Sf9 cells; animal cells such as CHO, COS, HeLa, C127, 3T3, BHK, HEK 293 and Bowes melanoma cells; and plant cells.

[0187] Numerous vectors are known in the art including, but not limited to, linear polynucleotides, polynucleotides associated with ionic or amphiphilic compounds, plasmids, and viruses. Thus, the term “vector” includes an autonomously replicating plasmid or a virus. The term should also be construed to include non-plasmid and non-viral compounds which facilitate transfer of nucleic acid into cells, such as, for example, polylysine compounds, liposomes, and the like. Examples of viral vectors include, but are not limited to, adenoviral vectors, adeno-associated virus vectors, retroviral vectors, and the like.

[0188] The expression vector can be transferred into a host cell by physical, biological or chemical means, discussed in detail elsewhere herein.

[0189] To ensure that the peptide obtained from either chemical or biological synthetic techniques is the desired peptide, analysis of the peptide composition can be conducted. Such amino acid composition analysis may be conducted using high resolution mass spectrometry to determine the molecular weight of the peptide. Alternatively, or additionally, the amino acid content of the peptide can be confirmed by hydrolyzing the peptide in aqueous acid, and separating, identifying and quantifying the components of the mixture using HPLC, or an amino acid analyzer. Protein sequenators, which sequentially degrade the peptide and identify the amino acids in order, may also be used to determine definitely the sequence of the peptide.

[0190] The peptides and chimeric proteins of the disclosure may be converted into pharmaceutical salts by reacting with inorganic acids such as hydrochloric acid, sulfuric acid, hydrobromic acid, phosphoric acid, etc., or organic acids such as formic acid, acetic acid, propionic acid, glycolic acid, lactic acid, pyruvic acid, oxalic acid, succinic acid, malic acid, tartaric acid, citric acid, benzoic acid, salicylic acid, benezenesulfonic acid, and toluenesulfonic acids.

[0191] In certain embodiments, a gene editing system comprises meganucleases. In some embodiments, the gene editing system comprises zinc finger nucleases (ZFNs). In some embodiments, the gene editing system comprises transcription activator-like effector nucleases (TALENs). These gene editing systems can be broadly classified into two categories based on their mode of DNA recognition: ZFNs, TALENs and meganucleases achieve specific DNA binding via protein-DNA interactions, whereas CRISPR-Cas systems are targeted to specific DNA sequences by a short RNA guide molecule that base-pairs directly with the target DNA and by protein-DNA interactions.

### Guide Nucleic Acids

[0192] The compositions of the disclosure include sequence encoding a guide RNA (gRNA) comprising a sequence that is complementary to a target sequence.

[0193] In some embodiments, the composition comprises at least one isolated guide nucleic acid, or fragment thereof, where the guide nucleic acid comprises a nucleotide sequence that is complementary to one or more target sequences. In some embodiments, the guide nucleic acid is a guide RNA (gRNA).

[0194] In some embodiments, the gRNA comprises a crRNA:tracrRNA duplex. In some embodiments, the gRNA comprises a stem-loop that mimics the natural duplex between the crRNA and tracrRNA. In some embodiments, the stem-loop comprises a nucleotide sequence comprising AGAAAU. For example in some embodiments, the composition comprises a synthetic or chimeric guide RNA comprising a crRNA, stem, and tracrRNA.

[0195] In certain embodiments, the composition comprises an isolated crRNA and/or an isolated tracrRNA which hybridize to form a natural duplex. For example, in some embodiments, the gRNA comprises a crRNA or crRNA precursor (pre-crRNA) comprising a targeting sequence.

[0196] In some embodiments, the gRNA comprises a nucleotide sequence that is substantially complementary to a target sequence. The target sequence may be any sequence in any coding or non-coding region.

[0197] The guide RNA sequence can be a sense or anti-sense sequence. The guide RNA sequence generally includes a proto-spacer adjacent motif (PAM). The sequence of the PAM can vary depending upon the specificity requirements of the CRISPR endonuclease used. In the CRISPR-Cas system derived from S. pyogenes, the target DNA typically immediately precedes a 5′-NGG proto-spacer adjacent motif (PAM). Thus, for the S. pyogenes Cas9, the PAM sequence can be AGG, TGG, CGG or GGG. Other Cas9 orthologs may have different PAM specificities. For example, Cas9 from S. thermophilus requires 5′-NNAGAA for CRISPR 1 and 5′-NGGNG for CRISPR3) and Neisseria meningitidis requires 5′-NNNNGATT). The specific sequence of the guide RNA may vary, but, regardless of the sequence, useful guide RNA sequences will be those that minimize off-target effects while achieving high efficiency. The length of the guide RNA sequence can vary from about 20 to about 60 or more nucleotides, for example about 20, about 21, about 22, about 23, about 24, about 25, about 26, about 27, about 28, about 29, about 30, about 31, about 32, about 33, about 34, about 35, about 36, about 37, about 38, about 39, about 40, about 45, about 50, about 55, about 60 or more nucleotides. Useful selection methods identify regions having extremely low homology between the foreign viral genome and host cellular genome including endogenous retroviral DNA, include bioinformatic screening using 12-bp+NGG target-selection criteria to exclude off-target human transcriptome or (even rarely) untranslated-genomic sites.

[0198] The guide RNA sequence can be configured as a single sequence or as a combination of one or more different sequences, e.g., a multiplex configuration. Multiplex configurations can include combinations of two, three, four, five, six, seven, eight, nine, ten, or more different guide RNAs.

[0199] When the compositions are administered in an expression vector, the guide RNAs can be encoded by a single vector. Alternatively, multiple vectors can be engineered to each include two or more different guide RNAs. When the compositions are administered as a nucleic acid or are contained within an expression vector, the CRISPR endonuclease can be encoded by the same nucleic acid or vector as the guide RNA sequences. Alternatively, or in addition, the CRISPR endonuclease can be encoded in a physically separate nucleic acid from the guide RNA sequences or in a separate vector.

[0200] In some embodiments, the RNA molecules e.g. crRNA, tracrRNA, gRNA are engineered to comprise one or more modified nucleobases. For example, known modifications of RNA molecules can be found, for example, in Genes VI, Chapter 9 (“Interpreting the Genetic Code”), Lewis, ed. (1997, Oxford University Press, New York), and Modification and Editing of RNA, Grosjean and Benne, eds. (1998, ASM Press, Washington D.C.). Modified RNA components include the following: 2′-O-methylcytidine; N⁴-methylcytidine; N⁴-2′-O-dimethylcytidine; N⁴-acetylcytidine; 5-methylcytidine; 5,2′-O-di methylcytidine; 5-hydroxymethylcytidine; 5-formylcytidine; 2′-O-methyl-5-formaylcytidine; 3-methylcytidine; 2-thiocytidine; lysidine; 2′-O-methyluridine; 2-thiouridine; 2-thio-2′-O-methyluridine; 3,2′-O-dimethyluridine; 3-(3-amino-3-carboxypropyl)uridine; 4-thiouridine; ribosylthymine; 5,2′-O-dimethyluridine; 5-methyl-2-thiouridine; 5-hydroxyuridine; 5-methoxyuridine; uridine 5-oxyacetic acid; uridine 5-oxyacetic acid methyl ester; 5-carboxymethyluridine; 5-methoxycarbonylmethyluridine; 5-methoxycarbonylmethyl-2′-O-methyluridine; 5-methoxycarbonylmethyl-2′-thiouridine; 5-carbamoylmethyluridine; 5-carbamoylmethyl-2′-O-methyluridine; 5-(carboxyhydroxymethyl)uridine; 5-(carboxyhydroxymethyl) uridinemethyl ester; 5-aminomethyl-2-thiouridine; 5-methylaminomethyluridine; 5-methylaminomethyl-2-thiouridine; 5-methylaminomethyl-2-selenouridine; 5-carboxymethylaminomethyluridine; 5-carboxymethylaminomethyl-2′-O-methyl-uridine; 5-carboxymethylaminomethyl-2-thiouridine; dihydrouridine; dihydroribosylthymine; 2′-methyladenosine; 2-methyladenosine; N⁶N-methyladenosine; N⁶,N⁶-dimethyladenosine; N⁶,2′-O-trimethyladenosine; 2-methylthio-N⁶N-isopentenyladenosine; N⁶-(cis-hydroxyisopentenyl)-adenosine; 2-methylthio-N⁶-(cis-hydroxyisopentenyl)-adenosine; N⁶-glycinylcarbamoyl)adenosine; N⁶-threonylcarbamoyl adenosine; N⁶-methyl-N⁶-threonylcarbamoyl adenosine; 2-methylthio-N⁶-methyl-N⁶-threonylcarbamoyl adenosine; N⁶-hydroxynorvalylcarbamoyl adenosine; 2-methylthio-N⁶-hydroxnorvalylcarbamoyl adenosine; 2′-O-ribosyladenosine (phosphate); inosine; 2′O-methyl inosine; 1-methyl inosine; 1;2′-O-dimethyl inosine; 2′-O-methyl guanosine; 1-methyl guanosine; N²-methyl guanosine; N²,N²-dimethyl guanosine; N²,2′-O-dimethyl guanosine; N²,N²,2′-O-trimethyl guanosine; 2′-O-ribosyl guanosine (phosphate); 7-methyl guanosine; N²;7-dimethyl guanosine; N²; N²;7-trimethyl guanosine; wyosine; methylwyosine; under-modified hydroxywybutosine; wybutosine; hydroxywybutosine; peroxywybutosine; queuosine; epoxyqueuosine; galactosyl-queuosine; mannosyl-queuosine; 7-cyano-7-deazaguanosine; arachaeosine [also called 7-formamido-7-deazaguanosine]; and 7-aminomethyl-7-deazaguanosine.

[0201] In certain embodiments, the composition comprises multiple different gRNAs, each targeted to a different target sequence. In certain embodiments, this multiplexed strategy provides for increased efficacy. In some embodiments, the compositions described herein utilize about 1 gRNA to about 6 gRNAs. In some embodiments, the compositions described herein utilize at least about 1 gRNA. In some embodiments, the compositions described herein utilize at most about 6 gRNAs. In some embodiments, the compositions described herein utilize about 1 gRNA to about 2 gRNAs, about 1 gRNA to about 3 gRNAs, about 1 gRNA to about 4 gRNAs, about 1 gRNA to about 5 gRNAs, about 1 gRNA to about 6 gRNAs, about 2 gRNAs to about 3 gRNAs, about 2 gRNAs to about 4 gRNAs, about 2 gRNAs to about 5 gRNAs, about 2 gRNAs to about 6 gRNAs, about 3 gRNAs to about 4 gRNAs, about 3 gRNAs to about 5 gRNAs, about 3 gRNAs to about 6 gRNAs, about 4 gRNAs to about 5 gRNAs, about 4 gRNAs to about 6 gRNAs, or about 5 gRNAs to about 6 gRNAs. In some embodiments, the compositions described herein utilize about 1 gRNA, about 2 gRNAs, about 3 gRNAs, about 4 gRNAs, about 5 gRNAs, or about 6 gRNAs.

[0202] In some embodiments, the gRNA is a synthetic oligonucleotide. In some embodiments, the synthetic nucleotide comprises a modified nucleotide. Modification of the inter-nucleoside linker (i.e. backbone) can be utilized to increase stability or pharmacodynamic properties. For example, inter-nucleoside linker modifications prevent or reduce degradation by cellular nucleases, thus increasing the pharmacokinetics and bioavailability of the gRNA. Generally, a modified inter-nucleoside linker includes any linker other than other than phosphodiester (PO) liners, that covalently couples two nucleosides together. In some embodiments, the modified inter-nucleoside linker increases the nuclease resistance of the gRNA compared to a phosphodiester linker. For naturally occurring oligonucleotides, the inter-nucleoside linker includes phosphate groups creating a phosphodiester bond between adjacent nucleosides. In some embodiments, the gRNA comprises one or more inter-nucleoside linkers modified from the natural phosphodiester. In some embodiments all of the inter-nucleoside linkers of the gRNA, or contiguous nucleotide sequence thereof, are modified. For example, in some embodiments the inter-nucleoside linkage comprises sulfur (S), such as a phosphorothioate inter-nucleoside linkage.

[0203] Modifications to the ribose sugar or nucleobase can also be utilized herein. Generally, a modified nucleoside includes the introduction of one or more modifications of the sugar moiety or the nucleobase moiety. In some embodiments, the gRNAs, as described, comprise one or more nucleosides comprising a modified sugar moiety, wherein the modified sugar moiety is a modification of the sugar moiety when compared to the ribose sugar moiety found in deoxyribose nucleic acid (DNA) and RNA. Numerous nucleosides with modification of the ribose sugar moiety can be utilized, primarily with the aim of improving certain properties of oligonucleotides, such as affinity and/or stability. Such modifications include those where the ribose ring structure is modified. These modifications include replacement with a hexose ring (HNA), a bicyclic ring having a biradical bridge between the C2 and C4 carbons on the ribose ring (e.g. locked nucleic acids (LNA)), or an unlinked ribose ring which typically lacks a bond between the C2 and C3 carbons (e.g. UNA). Other sugar modified nucleosides include, for example, bicyclohexose nucleic acids or tricyclic nucleic acids. Modified nucleosides also include nucleosides where the sugar moiety is replaced with a non-sugar moiety, for example in the case of peptide nucleic acids (PNA), or morpholino nucleic acids.

[0204] Sugar modifications also include modifications made by altering the substituent groups on the ribose ring to groups other than hydrogen, or the 2′-OH group naturally found in DNA and RNA nucleosides. Substituents may, for example be introduced at the 2′, 3′, 4′ or 5′ positions. Nucleosides with modified sugar moieties also include 2′ modified nucleosides, such as 2′ substituted nucleosides. Indeed, much focus has been spent on developing 2′ substituted nucleosides, and numerous 2′ substituted nucleosides have been found to have beneficial properties when incorporated into oligonucleotides, such as enhanced nucleoside resistance and enhanced affinity. A 2′ sugar modified nucleoside is a nucleoside that has a substituent other than H or —OH at the 2′ position (2′ substituted nucleoside) or comprises a 2′ linked biradicle, and includes 2′ substituted nucleosides and LNA (2′-4′ biradicle bridged) nucleosides. Examples of 2′ substituted modified nucleosides are 2′-O-alkyl-RNA, 2′-O-methyl-RNA, 2′-alkoxy-RNA, 2′-O-methoxyethyl-RNA (MOE), 2′-amino-DNA, 2′-Fluoro-RNA, and 2′-F-ANA nucleoside. By way of further example, in some embodiments, the modification in the ribose group comprises a modification at the 2′ position of the ribose group. In some embodiments, the modification at the 2′ position of the ribose group is selected from the group consisting of 2′-O-methyl, 2′-fluoro, 2′-deoxy, and 2′-O-(2-methoxyethyl).

[0205] In some embodiments, the gRNA comprises one or more modified sugars. In some embodiments, the gRNA comprises only modified sugars. In certain embodiments, the gRNA comprises greater than 10%, 25%, 50%, 75%, or 90% modified sugars. In some embodiments, the modified sugar is a bicyclic sugar. In some embodiments, the modified sugar comprises a 2′-O-methoxyethyl group. In some embodiments, the gRNA comprises both inter-nucleoside linker modifications and nucleoside modifications.

[0206] Target specificity can be used in reference to a guide RNA, or a crRNA specific to a target polynucleotide sequence or region and further includes a sequence of nucleotides capable of selectively annealing/hybridizing to a target (sequence or region) of a target polynucleotide (e.g. corresponding to a target), e.g., a target DNA. In some embodiments, a crRNA or the derivative thereof contains a target-specific nucleotide region complementary to a region of the target DNA sequence. In some embodiments, a crRNA or the derivative thereof contains other nucleotide sequences besides a target-specific nucleotide region. In some embodiments, the other nucleotide sequences are from a tracrRNA sequence.

[0207] gRNAs are generally supported by a scaffold, wherein a scaffold refers to the portions of gRNA or crRNA molecules comprising sequences which are substantially identical or are highly conserved across natural biological species (e.g. not conferring target specificity). Scaffolds include the tracrRNA segment and the portion of the crRNA segment other than the polynucleotide-targeting guide sequence at or near the 5′ end of the crRNA segment, excluding any unnatural portions comprising sequences not conserved in native crRNAs and tracrRNAs. In some embodiments, the crRNA or tracrRNA comprises a modified sequence. In certain embodiments, the crRNA or tracrRNA comprises at least 1, 2, 3, 4, 5, 10, or 15 modified bases (e.g. a modified native base sequence).

[0208] Complementary, as used herein, generally refers to a polynucleotide that includes a nucleotide sequence capable of selectively annealing to an identifying region of a target polynucleotide under certain conditions. As used herein, the term “substantially complementary” and grammatical equivalents is intended to mean a polynucleotide that includes a nucleotide sequence capable of specifically annealing to an identifying region of a target polynucleotide under certain conditions. Annealing refers to the nucleotide base-pairing interaction of one nucleic acid with another nucleic acid that results in the formation of a duplex, triplex, or other higher-ordered structure. The primary interaction is typically nucleotide base specific, e.g., A:T, A:U, and G:C, by Watson-Crick and Hoogsteen-type hydrogen bonding. In some embodiments, base-stacking and hydrophobic interactions can also contribute to duplex stability. Conditions under which a polynucleotide anneals to complementary or substantially complementary regions of target nucleic acids are well known in the art, e.g., as described in Nucleic Acid Hybridization, A Practical Approach, Hames and Higgins, eds., IRL Press, Washington, D.C. (1985) and Wetmur and Davidson, Mol. Biol. 31:349 (1968). Annealing conditions will depend upon the particular application and can be routinely determined by persons skilled in the art, without undue experimentation. Hybridization generally refers to process in which two single-stranded polynucleotides bind non-covalently to form a stable double-stranded polynucleotide. A resulting double-stranded polynucleotide is a “hybrid” or “duplex.” In certain instances, 100% sequence identity is not required for hybridization and, in certain embodiments, hybridization occurs at about greater than 70%, 75%, 80%, 85%, 90%, or 95% sequence identity. In certain embodiments, sequence identity includes in addition to non-identical nucleobases, sequences comprising insertions and/or deletions.

[0209] The nucleic acid of the disclosure, including the RNA (e.g., crRNA, tracrRNA, gRNA) or nucleic acids encoding the RNA, may be produced by standard techniques. For example, polymerase chain reaction (PCR) techniques can be used to obtain an isolated nucleic acid containing a nucleotide sequence described herein, including nucleotide sequences encoding a polypeptide described herein. PCR can be used to amplify specific sequences from DNA as well as RNA, including sequences from total genomic DNA or total cellular RNA. Various PCR methods are described in, for example, PCR Primer: A Laboratory Manual, 2^{nd} edition, Dieffenbach and Dveksler, eds., Cold Spring Harbor Laboratory Press, 2003. Generally, sequence information from the ends of the region of interest or beyond is employed to design oligonucleotide primers that are identical or similar in sequence to opposite strands of the template to be amplified. Various PCR strategies also are available by which site-specific nucleotide sequence modifications can be introduced into a template nucleic acid.

[0210] The isolated nucleic acids also can be chemically synthesized, either as a single nucleic acid (e.g., using automated DNA synthesis in the 3′ to 5′ direction using phosphoramidite technology) or as a series of oligonucleotides. Isolated nucleic acids of the disclosure also can be obtained by mutagenesis of, e.g., a naturally occurring portion crRNA, tracrRNA, RNA-encoding DNA, or of a Cas9-encoding DNA

[0211] In certain embodiments, the isolated RNAs are synthesized from an expression vector encoding the RNA molecule, as described in detail elsewhere herein.

### Nucleic Acids and Vectors

[0212] In some embodiments, the composition of the disclosure comprises an isolated nucleic acid encoding one or more elements of the CRISPR-Cas system described herein. For example, in some embodiments, the composition comprises an isolated nucleic acid encoding at least one guide nucleic acid (e.g., gRNA). In some embodiments, the composition comprises an isolated nucleic acid encoding a Cas peptide, or functional fragment or derivative thereof. In some embodiments, the composition comprises an isolated nucleic acid encoding at least one guide nucleic acid (e.g., gRNA) and encoding a Cas peptide, or functional fragment or derivative thereof. In some embodiments, the composition comprises an isolated nucleic acid encoding at least one guide nucleic acid (e.g., gRNA) and further comprises an isolated nucleic acid encoding a Cas peptide, or functional fragment or derivative thereof.

[0213] In some embodiments, the composition comprises at least one isolated nucleic acid encoding a gRNA, where the gRNA is substantially complementary to a target sequence. In some embodiments, the composition comprises at least one isolated nucleic acid encoding a gRNA, where the gRNA is complementary to a target sequence having at least 75%, 80%, 85%, 90%, 95%, 96%, 97%, 98%, or 99% sequence homology to a target sequence described herein.

[0214] In some embodiments, the composition comprises at least one isolated nucleic acid encoding a Cas peptide described elsewhere herein, or a functional fragment or derivative thereof. In some embodiments, the composition comprises at least one isolated nucleic acid encoding a Cas peptide having at least 75%, 80%, 85%, 90%, 95%, 96%, 97%, 98%, or 99% amino acid sequence homology with a Cas peptide described elsewhere herein.

[0215] The isolated nucleic acid may comprise any type of nucleic acid, including, but not limited to DNA and RNA. For example, in some embodiments, the composition comprises an isolated DNA, including for example, an isolated cDNA, encoding a gRNA or peptide of the disclosure, or functional fragment thereof. In some embodiments, the composition comprises an isolated RNA encoding a peptide of the disclosure, or a functional fragment thereof. The isolated nucleic acids may be synthesized using any method known in the art.

[0216] The present disclosure can comprise use of a vector in which the isolated nucleic acid described herein is inserted. The art is replete with suitable vectors that are useful in the present disclosure. Vectors include, for example, viral vectors (such as adenoviruses (“Ad”), adeno-associated viruses (AAV), and vesicular stomatitis virus (VSV) and retroviruses), liposomes and other lipid-containing complexes, and other macromolecular complexes capable of mediating delivery of a polynucleotide to a host cell. Vectors can also comprise other components or functionalities that further modulate gene delivery and/or gene expression, or that otherwise provide beneficial properties to the targeted cells. Such other components include, for example, components that influence binding or targeting to cells (including components that mediate cell-type or tissue-specific binding); components that influence uptake of the vector nucleic acid by the cell; components that influence localization of the polynucleotide within the cell after uptake (such as agents mediating nuclear localization); and components that influence expression of the polynucleotide. Such components also might include markers, such as detectable and/or selectable markers that can be used to detect or select for cells that have taken up and are expressing the nucleic acid delivered by the vector. Such components can be provided as a natural feature of the vector (such as the use of certain viral vectors which have components or functionalities mediating binding and uptake), or vectors can be modified to provide such functionalities. Other vectors include those described by Chen et al; BioTechniques, 34: 167-171 (2003). A large variety of such vectors is known in the art and is generally available.

[0217] In brief summary, the expression of natural or synthetic nucleic acids encoding an RNA and/or peptide is typically achieved by operably linking a nucleic acid encoding the RNA and/or peptide or portions thereof to a promoter, and incorporating the construct into an expression vector. The vectors to be used are suitable for replication and, optionally, integration in eukaryotic cells. Typical vectors contain transcription and translation terminators, initiation sequences, and promoters useful for regulation of the expression of the desired nucleic acid sequence.

[0218] The vectors of the present disclosure may also be used for nucleic acid immunization and gene therapy, using standard gene delivery protocols. Methods for gene delivery are known in the art. See, e.g., U.S. Pat. Nos. 5,399,346, 5,580,859, 5,589,466, incorporated by reference herein in their entireties. In another embodiment, the disclosure provides a gene therapy vector.

[0219] The isolated nucleic acid of the disclosure can be cloned into a number of types of vectors. For example, the nucleic acid can be cloned into a vector including, but not limited to a plasmid, a phagemid, a phage derivative, an animal virus, and a cosmid. Vectors of particular interest include expression vectors, replication vectors, probe generation vectors, and sequencing vectors.

[0220] Further, the vector may be provided to a cell in the form of a viral vector. Viral vector technology is well known in the art and is described, for example, in Sambrook et al. (2001, Molecular Cloning: A Laboratory Manual, Cold Spring Harbor Laboratory, New York), and in other virology and molecular biology manuals. Viruses, which are useful as vectors include, but are not limited to, retroviruses, adenoviruses, adeno-associated viruses, herpes viruses, and lentiviruses. In general, a suitable vector contains an origin of replication functional in at least one organism, a promoter sequence, convenient restriction endonuclease sites, and one or more selectable markers, (e.g., WO 01/96584; WO 01/29058; and U.S. Pat. No. 6,326,193).

[0221] A number of viral based systems have been developed for gene transfer into mammalian cells. For example, retroviruses provide a convenient platform for gene delivery systems. A selected gene can be inserted into a vector and packaged in retroviral particles using techniques known in the art. The recombinant virus can then be isolated and delivered to cells of the subject either in vivo or ex vivo. A number of retroviral systems are known in the art. In some embodiments, adenovirus vectors are used. A number of adenovirus vectors are known in the art.

[0222] In some embodiments, lentivirus vectors are used. For example, vectors derived from retroviruses such as the lentivirus are suitable tools to achieve long-term gene transfer since they allow long-term, stable integration of a transgene and its propagation in daughter cells. Lentiviral vectors have the added advantage over vectors derived from onco-retroviruses such as murine leukemia viruses in that they can transduce non-proliferating cells, such as hepatocytes. They also have the added advantage of low immunogenicity. In some embodiments, the composition includes a vector derived from an adeno-associated virus (AAV). Adeno-associated viral (AAV) vectors have become powerful gene delivery tools for the treatment of various disorders. AAV vectors possess a number of features that render them ideally suited for gene therapy, including a lack of pathogenicity, minimal immunogenicity, and the ability to transduce postmitotic cells in a stable and efficient manner. Expression of a particular gene contained within an AAV vector can be specifically targeted to one or more types of cells by choosing the appropriate combination of AAV serotype, promoter, and delivery method.

[0223] A variety of different AAV capsids have been described and can be used, although AAV which preferentially target the liver and/or deliver genes with high efficiency are particularly desired. The sequences of the AAV8 are available from a variety of databases. While the examples utilize AAV vectors having the same capsid, the capsid of the gene editing vector and the AAV targeting vector are the same AAV capsid. Another suitable AAV is, e.g., rh10 (WO 2003/042397). Still other AAV sources include, e.g., AAV9 (see, for example, U.S. Pat. No. 7,906,111; US 2011-0236353-A1), and/or hu37 (see, e.g., U.S. Pat. No. 7,906,111; US 2011-0236353-A1), AAV1, AAV2, AAV3, AAV4, AAV5, AAV6, AAV6.2, AAV7, AAV8, (U.S. Pat. Nos. 7,790,449; 7,282,199, WO 2003/042397; WO 2005/033321, WO 2006/110689; U.S. Pat. Nos. 7,790,449; 7,282,199; 7,588,772). Still other AAV can be selected, optionally taking into consideration tissue preferences of the selected AAV capsid.

[0224] In some embodiments, AAV vectors disclosed herein include a nucleic acid encoding a CRISPR-Cas systems described herein. In some embodiments, the nucleic acid also includes one or more regulatory sequences allowing expression and, in some embodiments, secretion of the protein of interest, such as e.g., a promoter, enhancer, polyadenylation signal, an internal ribosome entry site (“IRES”), a sequence encoding a protein transduction domain (“PTD”), and the like. Thus, in some embodiments, the nucleic acid comprises a promoter region operably linked to the coding sequence to cause or improve expression of the protein of interest in infected cells. Such a promoter can be ubiquitous, cell- or tissue-specific, strong, weak, regulated, chimeric, etc., for example, to allow efficient and stable production of the protein in the infected tissue. In certain embodiments, the promoter is homologous to the encoded protein, or heterologous, although generally promoters of use in the disclosed methods are functional in human cells. Examples of regulated promoters include, without limitation, Tet on/off element-containing promoters, rapamycin-inducible promoters, tamoxifen-inducible promoters, and metallothionein promoters. In certain embodiments. other promoters used include promoters that are tissue specific for tissues such as kidney, spleen, and pancreas. Examples of ubiquitous promoters include viral promoters, particularly the CMV promoter, the RSV promoter, the SV40 promoter, etc., and cellular promoters such as the phosphoglycerate kinase (PGK) promoter and the b-actin promoter.

[0225] In some embodiments, the recombinant AAV vector comprises packaged within an AAV capsid, a nucleic acid, generally containing a 5′ AAV ITR, the expression cassettes described herein and a 3′ AAV ITR. As described herein, in some embodiments, an expression cassette contains regulatory elements for an open reading frame(s) within each expression cassette and the nucleic acid optionally contains additional regulatory elements.

[0226] The AAV vector, in some embodiments, comprises a full-length AAV 5′ inverted terminal repeat (ITR) and a full-length 3′ ITR. A shortened version of the 5′ ITR, termed AITR, has been described in which the D-sequence and terminal resolution site (trs) are deleted. The abbreviation “sc” refers to self-complementary. “Self-complementary AAV” refers a construct in which a coding region carried by a recombinant AAV nucleic acid sequence has been designed to form an intra-molecular double-stranded DNA template. Upon infection, rather than waiting for cell mediated synthesis of the second strand, the two complementary halves of scAAV will associate to form one double stranded DNA (dsDNA) unit that is ready for immediate replication and transcription (see, for example, D M McCarty et al, “Self-complementary recombinant adeno-associated virus (scAAV) vectors promote efficient transduction independently of DNA synthesis”, Gene Therapy, (August 2001); see also, for example, U.S. Pat. Nos. 6,596,535; 7,125,717; and 7,456,683). Where a pseudotyped AAV is to be produced, the ITRs are selected from a source which differs from the AAV source of the capsid. For example, in some embodiments, AAV2 ITRs are selected for use with an AAV capsid having a particular efficiency for a selected cellular receptor, target tissue or viral target. In some embodiments, the ITR sequences from AAV2, or the deleted version thereof (ΔITR), are used for convenience and to accelerate regulatory approval (i.e. pseudotyped). In some embodiments, a single-stranded AAV viral vector is used.

[0227] Methods for generating and isolating AAV viral vectors suitable for delivery to a subject are known in the art (see, for example, U.S. Pat. Nos. 7,790,449; 7,282,199; WO 2003/042397; WO 2005/033321, WO 2006/110689; and U.S. Pat. No. 7,588,772 B2, U.S. Pat. Nos. 5,139,941; 5,741,683; 6,057,152; 6,204,059; 6,268,213; 6,491,907; 6,660,514; 6,951,753; 7,094,604; 7,172,893; 7,201,898; 7,229,823; and 7,439,065). In one system, a producer cell line is transiently transfected with a construct that encodes the transgene flanked by ITRs and a construct(s) that encodes rep and cap. In a second system, a packaging cell line that stably supplies rep and cap is transfected (transiently or stably) with a construct encoding the transgene flanked by ITRs. In each of these systems, AAV virions are produced in response to infection with helper adenovirus or herpesvirus, requiring the separation of the rAAVs from contaminating virus. More recently, systems have been developed that do not require infection with helper virus to recover the AAV—the required helper functions (i.e., adenovirus E1, E2a, VA, and E4 or herpesvirus UL5, UL8, UL52, and UL29, and herpesvirus polymerase) are also supplied, in trans, by the system. In these newer systems, the helper functions can be supplied by transient transfection of the cells with constructs that encode the required helper functions, or the cells can be engineered to stably contain genes encoding the helper functions, the expression of which can be controlled at the transcriptional or posttranscriptional level. In yet another system, the transgene flanked by ITRs and rep/cap genes are introduced into insect cells by infection with baculovirus-based vectors.

[0228] Reporter genes are used for identifying potentially transfected cells and for evaluating the functionality of regulatory sequences. In general, a reporter gene is a gene that is not present in or expressed by the recipient organism or tissue and that encodes a polypeptide whose expression is manifested by some easily detectable property, e.g., enzymatic activity. Expression of the reporter gene is assayed at a suitable time after the DNA has been introduced into the recipient cells. Suitable reporter genes may include genes encoding luciferase, beta-galactosidase, chloramphenicol acetyl transferase, secreted alkaline phosphatase, or the green fluorescent protein gene (e.g., Ui-Tei et al., 2000 FEBS Letters 479: 79-82). Suitable expression systems are well known and may be prepared using known techniques or obtained commercially. In general, the construct with the minimal 5′ flanking region showing the highest level of expression of reporter gene is identified as the promoter. Such promoter regions may be linked to a reporter gene and used to evaluate agents for the ability to modulate promoter-driven transcription.

[0229] Methods of introducing and expressing genes into a cell are known in the art. In the context of an expression vector, the vector can be readily introduced into a host cell, e.g., mammalian, bacterial, yeast, or insect cell by any method in the art. For example, the expression vector can be transferred into a host cell by physical, chemical, or biological means.

[0230] Physical methods for introducing a polynucleotide into a host cell include calcium phosphate precipitation, lipofection, particle bombardment, microinjection, electroporation, and the like. Methods for producing cells comprising vectors and/or exogenous nucleic acids are well-known in the art. See, for example, Sambrook et al. (2012, Molecular Cloning: A Laboratory Manual, Cold Spring Harbor Laboratory, New York). A preferred method for the introduction of a polynucleotide into a host cell is calcium phosphate transfection.

[0231] Biological methods for introducing a polynucleotide of interest into a host cell include the use of DNA and RNA vectors. Viral vectors, and especially retroviral vectors, have become the most widely used method for inserting genes into mammalian, e.g., human cells. Other viral vectors can be derived from lentivirus, poxviruses, herpes simplex virus I, adenoviruses and adeno-associated viruses, and the like. See, for example, U.S. Pat. Nos. 5,350,674 and 5,585,362.

[0232] Chemical means for introducing a polynucleotide into a host cell include colloidal dispersion systems, such as macromolecule complexes, nanocapsules, microspheres, beads, and lipid-based systems including oil-in-water emulsions, micelles, mixed micelles, and liposomes. An exemplary colloidal system for use as a delivery vehicle in vitro and in vivo is a liposome (e.g., an artificial membrane vesicle).

[0233] In the case where a non-viral delivery system is utilized, an exemplary delivery vehicle is a liposome. The use of lipid formulations is contemplated for the introduction of the nucleic acids into a host cell (in vitro, ex vivo or in vivo). In another aspect, the nucleic acid may be associated with a lipid. The nucleic acid associated with a lipid may be encapsulated in the aqueous interior of a liposome, interspersed within the lipid bilayer of a liposome, attached to a liposome via a linking molecule that is associated with both the liposome and the oligonucleotide, entrapped in a liposome, complexed with a liposome, dispersed in a solution containing a lipid, mixed with a lipid, combined with a lipid, contained as a suspension in a lipid, contained or complexed with a micelle, or otherwise associated with a lipid. Lipid, lipid/DNA or lipid/expression vector associated compositions are not limited to any particular structure in solution. For example, they may be present in a bilayer structure, as micelles, or with a “collapsed” structure. They may also simply be interspersed in a solution, possibly forming aggregates that are not uniform in size or shape. Lipids are fatty substances which may be naturally occurring or synthetic lipids. For example, lipids include the fatty droplets that naturally occur in the cytoplasm as well as the class of compounds which contain long-chain aliphatic hydrocarbons and their derivatives, such as fatty acids, alcohols, amines, amino alcohols, and aldehydes.

[0234] Lipids suitable for use can be obtained from commercial sources. For example, dimyristyl phosphatidylcholine (“DMPC”) can be obtained from Sigma, St. Louis, MO; dicetyl phosphate (“DCP”) can be obtained from K & K Laboratories (Plainview, NY); cholesterol (“Choi”) can be obtained from Calbiochem-Behring; dimyristyl phosphatidylglycerol (“DMPG”) and other lipids may be obtained from Avanti Polar Lipids, Inc. (Birmingham, AL). Stock solutions of lipids in chloroform or chloroform/methanol can be stored at about −20° C. Chloroform is used as the only solvent since it is more readily evaporated than methanol. “Liposome” is a generic term encompassing a variety of single and multilamellar lipid vehicles formed by the generation of enclosed lipid bilayers or aggregates. Liposomes can be characterized as having vesicular structures with a phospholipid bilayer membrane and an inner aqueous medium. Multilamellar liposomes have multiple lipid layers separated by aqueous medium. They form spontaneously when phospholipids are suspended in an excess of aqueous solution. The lipid components undergo self-rearrangement before the formation of closed structures and entrap water and dissolved solutes between the lipid bilayers (Ghosh et al., 1991 Glycobiology 5: 505-10). However, compositions that have different structures in solution than the normal vesicular structure are also encompassed. For example, the lipids may assume a micellar structure or merely exist as nonuniform aggregates of lipid molecules. Also contemplated are lipofectamine-nucleic acid complexes.

[0235] Regardless of the method used to introduce exogenous nucleic acids into a host cell, in order to confirm the presence of the recombinant nucleic acid sequence in the host cell, a variety of assays may be performed. Such assays include, for example, “molecular biological” assays well known to those of skill in the art, such as Southern and Northern blotting, RT-PCR and PCR; “biochemical” assays, such as detecting the presence or absence of a particular peptide, e.g., by immunological means (ELISAs and Western blots) or by assays described herein to identify agents falling within the scope of the disclosure.

### EXAMPLES

[0236] The following examples are illustrative.

### Example 1: Genome Oligopaint Via Local Denaturation Fluorescence In Situ Hybridization (GOLD FISH)

[0237] The CRISPR-Cas9 system from Streptococcus pyogenes has been widely used for genome editing in cells (Cong et al., 2013; Doudna and Charpentier, 2014; Mali et al., 2013b). In the CRISPR-Cas9 system, the Cas9 endonuclease can be programed with a guide RNA to target a desired DNA sequence (Gasiunas et al., 2012; Jinek et al., 2012; Sapranauskas et al., 2011). An on-target DNA substrate of Cas9 ribonucleoprotein (RNP) contains a 20-nucleotide (nt) protospacer region complementary to the spacer sequence of guide RNA, and a protospacer adjacent motif (PAM, 5′-NGG-3′ for Streptococcus pyogenes Cas9; N representing any nucleotide) (Jinek et al., 2012). After the Cas9 RNP binds to an on-target DNA substrate, the target strand (TS) and non-target strand (NTS) of the DNA substrate are cleaved by HNH nuclease domain and RuvC nuclease domain, respectively (Gasiunas et al., 2012; Jinek et al., 2012; Sapranauskas et al., 2011). After catalysis in vitro, Cas9 remains stably bound to the cleaved DNA substrate (Singh et al., 2016; Sternberg et al., 2014). Engineering the active sites of the nuclease domains creates the Cas9_{dHNH} variant (Cas9 with H840A mutation) that cuts only the NTS, and the dCas9 variant (Cas9 with 1-1840A and D10A mutations) that is inactive for DNA cleavage (Jinek et al., 2012). CRISPR-mediated transcriptional activation and repression platforms (CRISPRa and CRISPRi) were developed utilizing dCas9 (Gilbert et al., 2013; Maeder et al., 2013; Mali et al., 2013a; Perez-Pinera et al., 2013; Qi et al., 2013).

[0238] DNA fluorescence in situ hybridization (DNA FISH) allows for direct visualization of specific DNA sequences in situ, making it a powerful tool to study chromatin conformation and gene localization (Beliveau et al., 2012; Boettiger et al., 2016; Levsky and Singer, 2003; Wang et al., 2016). Conventional DNA FISH requires harsh conditions such as high temperature and concentrated formamide to globally denature genomic DNA for probe hybridization, which risk disrupting the integrity of biological structures such as heat-labile epitopes of proteins and increase the likelihood of DNA FISH probes binding to off-target genomic DNA sequences that are exposed due to global denaturing. By exploiting the high binding affinity of dCas9 RNP to specific DNA sequences, fluorescently labeled dCas9 RNP has been adopted for genomic loci imaging in live cells or in fixed cells without global genomic DNA denaturation (Chen et al., 2013; Chen et al., 2016a; Deng et al., 2015; Hong et al., 2018; Ma et al., 2018; Neguembor et al., 2018; Qin et al., 2017; Wang et al., 2019). Visualization of non-repetitive genomic sequences has been achieved with dCas9-binding-based genomic imaging methods (Chen et al., 2013; Deng et al., 2015; Hong et al., 2018; Mao et al., 2019; Qin et al., 2017; Shao et al., 2018), but the signal-to-background ratio was compromised by non-specific binding of dCas9 RNP to off-targets in genomic DNA (Knight Spencer et al., 2017; Lakadamyali and Cosma, 2020; Wu et al., 2019). Cas9 RNP can tolerate up to eleven PAM-distal mismatches on the DNA substrate for stable binding in vitro (Singh et al., 2016; Sternberg et al., 2014). However, more than three PAM-distal mismatches drastically reduce or inhibit DNA cleavage activities of Cas9 RNP (Sternberg et al., 2015), indicating that the cleavage specificity of Cas9 RNP is much higher than its specificity for stable binding. Conformational activation of Cas9 is dependent of the base-pairing between guide RNA and target DNA, but it is independent of whether the nuclease domains are engineered to be catalytically dead or not (Anders et al., 2014; Dagdas et al., 2017; Huai et al., 2017; Jiang et al., 2016; Nishimasu et al., 2014; Sternberg et al., 2015). We therefore expect that Cas9 nickase variants such as Cas9_{dHNH} should have similar cleavage specificity as Cas9, and a genomic imaging method that relies on Cas9 or Cas9 nickase variants cleaving target DNA would have higher labeling specificity than Cas9-binding-based genomic imaging methods.

[0239] In this study, we show that the post-cleavage Cas9_{dHNH}-RNA-DNA ternary complex can recruit a 3′ to 5′ DNA helicase to unwind double-stranded DNA (dsDNA) beyond the protospacer. Exploiting this observation, we demonstrate a physiological-temperature DNA FISH method that leverages the high cleavage specificity of Cas9_{dHNH} to label target genomic DNA.

### Design

[0240] Previous cell-based studies suggested that the NTS in Cas9-RNA-DNA complex is exposed and available for annealing to an exogenous DNA strand (Richardson et al., 2016). Cleavage on the NTS reveals ˜17-nt of single-stranded DNA (ssDNA) with a 3′ hydroxyl end, the NTS 3′ flap (FIG. 1A) (Jinek et al., 2012). A recent single-molecule study showed that the NTS 3′ flap can be digested by a ssDNA-specific exonuclease, suggesting the 3′ hydroxyl end may be exposed to solvent (Wang et al., 2020). Rep-X is a highly processive 3′ to 5′ DNA helicase engineered from K col Rep helicase through conformational control (Arslan et al., 2015; Hua et al., 2018) based on mechanistic understanding of its activity regulation (Cheng et al., 2001; Comstock et al., 2015; Korolev et al., 1997; Lee et al., 2013). The ssDNA translocating and dsDNA unwinding activities of Rep-X are powered by ATP hydrolysis. We hypothesized that Rep-X can be loaded onto the NTS 3′ flap, translocate along the NTS, and unwind the dsDNA downstream of the protospacer (FIG. 1A). If the hypothesis is true, Cas9 RNP can function as a programmable loader of Rep-X to genomic DNA and the loaded Rep-X can unwind the downstream genomic DNA until it encounters an insurmountable blockade (FIG. 1B). If Rep-X loaded onto a cleaved NTS unwinds a long enough stretch of genomic DNA, the resulting ssDNA could be targeted by fluorescently labeled oligonucleotide probes for site specific imaging of genomic DNA in the cell (FIG. 1B). In this scheme that we call Genome Oligopaint via Local Denaturation Fluorescence in Situ Hybridization (GOLD FISH), after cell fixation, we first add the non-target strand nickase (Cas9_{dHNH} RNP) to bind and cleave specific DNA sequences in the cells. Next, we add Rep-X and ATP to unwind the dsDNA downstream of each Cas9_{dHNH} cleavage site and expose the FISH target sequences (FISH-TS, FIG. 1B). ATP is then removed. We surmised that the NTS that Rep-X translocates along may be removed from chromatin by Rep-X, for example if it hits the another nick generated by Cas9_{dHNH} nearby, or form secondary structures, or remain bound by Rep-X, preventing reannealing of the unwound genomic DNA (FIG. 1B). Finally, the Cy5-labeled FISH probes are added to hybridize with complementary FISH-TS sequences.

### Results

### Cas9_{dHNH} Exposes Cleaved NTS for Rep-X Superhelicase Loading

[0241] To test if Rep-X could be loaded onto the Cas9_{dHNH}-generated NTS 3′ flap and unwind the dsDNA beyond the protospacer at the single-molecule level, we developed a DNA helicase invasion assay (FIG. 1C). In this assay, the Cas9_{dHNH}-IRA-DNA ternary complex was assembled in Mg²⁺-containing imaging buffer and immobilized on a quartz slide through biotin-NeutrAvidin interaction (FIG. 1C). We internally labeled the PAM-distal region of the NTS with Cy5 so that if the loaded Rep-X fully unwound the 20-bp DNA downstream of the protospacer, fluorescence signal of Cy5 would be lost from the surface-tethered DNA (FIG. 1C). The internal Cy5-labeling on the NTS does not affect the DNA cleavage activity of Cas9 (Singh et al., 2018). When Rep-X and ATP were added together, the average number of fluorescent spots per image area decreased over time (FIGS. 1D and 1E), indicating that the Cy5-labeled DNA strand downstream of the NTS cleavage site was unwound by Rep-X and lost from the surface (FIG. 1C). Control experiments using dCas9 or without ATP did not show Cy5 spots decrease with time (FIG. 1F), indicating that both DNA nicking by Cas9_{dHNH} and ATP hydrolysis-driven DNA unwinding by Rep-X are necessary to remove the downstream NTS DNA. Together, our data suggest that Rep-X can invade into the Cas9_{dHNH}-RNA-DNA complex through the cleaved NTS and unwind the downstream dsDNA, supporting the design principle of GOLD FISH.

GOLD FISH Allows Efficient Labeling of a Repetitive Region within the MUC4 Gene at Physiological Temperature

[0242] We first tested GOLD FISH on a repetitive region within the MUC4 gene (MUC4-R) in IMR-90 cells, a human female diploid fibroblast strain (Nichols et al., 1977), so that a single guide RNA and a single Cy5-labeled FISH probe could be used to decorate the gene with multiple fluorophores. The GOLD FISH images of MUC4-R obtained using epifluorescence microscopy showed that 93% of cells contained 2 to 4 bright foci with low background (FIGS. 2A and 2B). Percentages of cells showing a particular number of foci are indicated above the corresponding histogram bin). We referred previously measured percentages of IMR-90 cells in G0/G1 (should have 2 foci) and S/G2/M (should have 4 foci) (Shi et al, 2007), and estimated the efficiency of detection to be 90%. Control experiments performed using dCas9 or without ATP showed weak or no detectable foci (FIGS. 6A and 6B), indicating that both DNA nicking by Cas9_{dHNH} and ATP hydrolysis-driven DNA unwinding by Rep-X are necessary to obtain bright GOLD FISH signals.

[0243] To test if GOLD FISH works in other cell types and if the FISH probes co-localize with Cas9 binding sites, we used an ATTO550-labeled guide RNA and performed GOLD FISH of MUC4-R in HEK293ft cells (co-localization assay, FIG. 2C). We found the guide RNA, and by inference Cas9_{dHNH} remained visibly bound to target DNA under our experimental condition, and 90% of Cy5 loci co-localized with ATTO550 loci (FIGS. 2D and 2E). Next, we access whether GOLD FISH reduces nuclear background arising from non-specific binding of Cas9_{dHNH} RNP. Of note, it is possible that some on- and off-target ATTO550-labeled Cas9_{dHNH} RNP dissociated from the cells during the Rep-X unwinding and FISH probe hybridization steps in GOLD FISH (FIG. 2E). To fairly compare GOLD FISH signals with signals from labeled Cas9_{dHNH} RNP binding, we also performed Cas9-mediated fluorescence in situ hybridization (CASFISH) against MUC4-R using either Cas9_{dHNH} or dCas9 with the ATTO550-labeled guide RNA (FIGS. 6C and 6D) (Deng et al., 2015). We measured the signal-to-background ratios of the ATTO550 foci and Cy5 foci from the co-localization assay (S/B_{ATTO550-colocalization} and S/B_{Cy5-colocalization}), as well as that of the CASFISH foci (S/B_{CASFISH-Cas9dHNH} and S/B_{CASFISH-dCas9}) (FIG. 2F). We found S/B_{Cy5-colocalization}; (17.4±6.6, mean±S.D.) was substantially greater than S/B_{ATTO550-colocalization} (2.7±1.4, mean±S.D.), S/B_{CASFISH-Cas9dHNH} (1.3-0.8, mean±S.D.) and S/B_{CASFISH-dCas9} (0.9±0.4, mean±S.D.), Control experiments performed without Cas9 enzyme showed that the nuclear background arising from cellular autofluorescence and non-specific intracellular binding of ATTO550-labeled guide RNA was negligible (FIG. 6E). Therefore, higher non-specific binding of labeled Cas9_{dHNH} RNP is responsible for the lower signal-to-background ratio of the ATTO550 foci in the co-localization assay and the CASFISH foci (FIG. 2F). S/B_{ATTO550-colocalization} being higher than S/B_{CASFISH-Cas9dHNH} also suggests that some non-specifically bound Cas9_{dHNH} RNP dissociated from the cells during the Rep-X unwinding and FISH probe hybridization steps in GOLD FISH (FIG. 2F). Together, these data indicate that GOLD FISH, which requires Cas9 cleavage of target DNA to achieve efficient labeling (FIGS. 23 and 6A), has much reduced non-specific labeling compared to the genomic imaging methods relying on labeled Cas9 RNP binding alone.

### GOLD FISH Enables Robust Labeling of Non-Repetitive DNA Sequences and Provides Chromatin Conformational Information

[0244] Low nonspecific binding of GOLD FISH should greatly facilitate non-repetitive loci imaging, which is generally much more challenging due to the need to include guide RNAs and FISH probes of multiple sequences at the same time. For example, if n different guide-RNA sequences and n different FISH probes are used, the total concentration of guide RNAs and FISH probes would have to be m and n times higher, respectively, to achieve the same signal level for each probe, potentially increasing background arising from nonspecific probe binding. A previous CASFISH study used 73 different guide RNAs to label a non-repetitive region within the MUC4 gene and observed compromised labeling efficiency and increased background (Deng et al., 2015). In order to test the capability of GOLD FISH in targeting non-repetitive DNA sequences, we designed 9 different guide RNAs (MUC4-NR guide-RNA set 1) targeting a 2.3-kilobases (kb) non-repetitive region within the MUC4 gene (MUC4-NR), with an approximate spacing of 300 base pair (bp) between them, and 57 different Cy5-labeled FISH probes that bind regions between the guide RNAs (FIG. 3A, top). Remarkably, GOLD FISH efficiently labeled the MUC4-NR region (FIG. 3A). 89% of cells had 2 to 4 FISH loci and the average signal-to-background ratio was 7.8 (FIGS. 3B and 7, percentages of cells with specific number of foci are shown above the histogram in FIG. 3B). The specificity of MUC4-NR FISH loci was verified by colocalization with MUC4-R loci (FIGS. 3A and 3C). The excellent labeling efficiency and signal-to-background ratio of MUC4-NR GOLD FISH confirm that it is capable of non-repetitive loci imaging without high nuclear background.

[0245] Rep-X can unwind thousands of base pairs of dsDNA in vitro (Arslan et al., 2015). To examine whether Rep-X is similarly processive on the genomic DNA, we performed GOLD FISH using the same fluorescently labeled probes targeting the MUC4-NR region but a new set of guide RNAs (MUC4-NR guide-RNA set 2). This set contains 11 different guide RNAs targeting a 2.4-kb region next to the MUC4-NR probe tiling region (FIG. 3D, top). Only 39% of cells had ≥2 detectable FISH loci, and the detectable loci had 30% lower signal-to-background ratio on average in comparison with using the MUC4-NR guide-RNA set 1 (FIGS. 3D and 3E). Next, we designed another set of guide RNAs (MUC4-I1) targeting a 2.5-kb repetitive region (˜50 copies) that is 30 kb away from the MUC4-NR probe tiling region (FIG. 3F, top). We found 91% cells did not have detectable focus (FIGS. 3F and 3G). Although it is possible that the MUC4-NR guide-RNA set 1, MUC4-NR guide-RNA set 2 and MUC4-I1 have different on-target activities which could lead to variability in labeling efficiency, the reduced labeling efficiency when unwinding initiates a few kb away (FIGS. 3D and 3F) is more likely because that Rep-X failed to efficiently unwind the chromatin from the Cas9 cleavage sites to the probe tiling region. We presume this is because the crowded nuclear environment and presence of nucleosomes inside cells prevent even a superhelicase from unwinding a very long stretch of chromatin. Therefore, we conclude that GOLD FISH locally denatures the targeted chromatin for FISH probe hybridization.

[0246] Next, we investigated if GOLD FISH can be used to quantitatively assess chromatin conformations. CASFISH and CRISPR/Cas9-mediated proximity ligation assay (CasPLA) are previously reported Cas9-mediated genomic imaging methods that are capable of labeling nonrepetitive loci in fixed cells (Deng et al., 2015; Zhang et al., 2018). The two methods use a solution of methanol and acetic acid (MAA) as the cell fixative. GOLD FISH experiments described above were also performed in MAA-fixed cells. However, it is known that fixation with methanol may cause a nuclear shrinkage (Boettiger et al., 2016). We found that, although the MAA fixation largely preserved the nuclear morphology, the projected nuclear area is reduced by 10% (FIGS. 8A and 8B). To overcome this issue, we combined a previously developed buffered ethanol (BE70) with MAA fixation (BE70-MAA) (Perry et al., 2016): the cells were fixed in BE70, and further permeabilized in MAA. We found that the BE70-MAA fixation method preserved the nucleus with a less than 1.2% reduction in projected nuclear area (FIGS. 8A and 8B). Next, we measured the spatial distance between two genomic regions by two-color GOLD FISH. Of the 40 topologically associated domains (TADs) previously identified in chromosome X (ChrX) of IMR-90 cells (Dixon et al., 2012), we chose two non-repetitive regions located in the 5^{th} and the 37^{th} TAD (TAD5 and TAD37, respectively). The genomic distance between TAD5 and TAD37 is 125 megabases (Mb, FIG. 4A, top). Two-color GOLD FISH against TAD5 and TAD37 was performed in the BE70-MAA-fixed IMR-90 cells (FIG. 4A). We were also able to distinguish inactive chromosome X (Xi) from active chromosome X (Xa) by concurrent MacroH2A.1 immunostaining (FIGS. 4A and 8C) (Costanzi and Pehrson, 1998). The average three-dimensional distance between TAD5 and TAD37 was 1.5 μm for Xi and 2.9 μm for Xa, close to the previously reported values (FIG. 4B) (Wang et al., 2016). Control GOLD FISH experiments using TAD5 guide RNAs with TAD37 probes or TAD37 guide RNAs with TAD5 probes showed that more than 96% cells had no detectable focus (FIGS. 8D and 8E), further supporting that GOLD FISH denatures genomic DNA locally. These results demonstrate that GOLD FISH can robustly target multiple non-repetitive DNA loci and provide chromatin structural information.

### Chromosomal Scale GOLD FISH

[0247] We further extended GOLD FISH to the chromosomal scale and imaged the p-arm and q-arm of ChrX in the BE70-MAA-fixed IMR-90 cells. We designed 3,287 guide RNAs and 2,307 FISH probes targeting all 40 TADs of ChrX in the IMR-90 cells. The FISH probes consist of unlabeled primary probes and fluorescently labeled readout probes (FIG. 4C). Each primary probe contains an encoding region complementary to genomic DNA, a readout region complementary to a specific readout probe, and two primer regions for amplification of the primary probe library (FIG. 4C). The probes against the p-arm and the q-arm of ChrX were labeled with Cy3 and Cy5, respectively (FIG. 4C). The GOLD FISH signals of the p-arm and the q-arm were cloud-like (FIGS. 4D and 9A), and MacroH12A.1 immunostaining was performed to distinguish Xi from Xa (FIG. 4D). The average center-of-mass distance between the p-arm and the q-arm for Xa is 28% larger than that for Xi (FIG. 4E), and the average volume of Xa is 53% greater than that of Xi (FIG. 9B). This is consistent with a previous finding that Xi adopts more compact conformations than Xa (Wang et al., 2016). Our data suggest GOLD FISH is scalable ranging from a single locus as short as 2.3 kb to chromosomal scale ‘paint’.

### GOLD FISH Allows for Rapid Identification of HER2 Gene Amplification in Tissue Samples

[0248] Finally, we show that GOLD FISH is applicable to non-repetitive DNA sequences in pathologic tissue samples. DNA FISH is widely used for diagnosis of molecular pathologies like Human Epidermal Growth Factor Receptor 2 (HER2) gene amplification in breast cancer patients, where the HER2 FISH spot number is compared to an enumeration gene or region of chromosome 17 (e.g. centromere region of chromosome 17 (CEP17)) to calculate the gene amplification state (FIG. 5A) (Furrer et al., 2015). Tissue samples fixed by non-crosslinking fixatives have several advantages compared to crosslinking-fixed tissue samples including higher quality and quantity of DNA, RNA and protein extraction (Oberauner-Wappis et al., 2016; Perry et al., 2016). Non-crosslinking fixation also allows faster probe hybridization to sequences of interest (Shaffer et al., 2013). However, the HER2 gene amplification testing in the non-crosslinking-fixed tissue samples requires an 18 to 24 hours crosslinking reaction prior to overnight conventional DNA FISH (Oberauner-Wappis et al., 2016), which extends the experimental procedures to days. To test whether GOLD FISH can rapidly detect non-repetitive sequences in the non-crosslinking-fixed tissue samples, we performed GOLD FISH targeting the HER2 gene and CEP17 in BE70-MAA-fixed human breast cancer tissue sections (10 μm thick), in parallel with immunostaining of HER2 protein. GOLD FISH efficiently labeled target sequences within 6 hours (including fixation time, FIG. 5B). By quantifying the numbers of HER2 and CEP17 foci per cell, we found 88% of cells had more than 4 copies of HER2 gene accompanied by high expression level of HER2 protein, while no more than 4 copies of CEP17 foci was observed (FIGS. 5B-5E, percentages of cells with specific number of foci are indicated above the histograms). The ratio of HER2/CEP17 foci numbers in each cell was 6.1±3.8 (mean±SD), indicating the HER2 gene amplification in the sample examined (FIG. 5F) (Wolff et al., 2013). Notably, although the Retinoic Acid Receptor Alpha (RARA) gene was suggested as a chromosome 17 enumeration gene (FIG. 5A) (Tse et al., 2011), we found RARA was co-amplified with HER2 gene (FIGS. 10A and 5F) (Varga et al., 2012). Therefore, RARA did not faithfully show the copy number of chromosome 17 in this tissue sample. Together, our analysis suggests that GOLD FISH can be directly applied to non-crosslinking fixed tissue samples for rapid DNA detection.

### Discussion

[0249] In this study, we repurposed the Cas9_{dHNH} RNP as a programmable loader of superhelicase to genomic DNA. We showed that Cas9_{dHNH} cleavage exposes a ssDNA region on the NTS, allowing Rep-X superhelicase to load on and unwind downstream dsDNA. Based on this, we developed GOLD FISH, a superhelicase-mediated physiological-temperature DNA FISH method. GOLD FISH leverages the high specificity of Cas9_{dHNH} cleavage to trigger targeted genomic DNA denaturing and shows several advantages when compared to other genomic imaging methods.

[0250] Current Cas9-mediated genomic imaging methods rely on the binding of directly or indirectly labeled dCas9 RNP to target DNA (Chen et al., 2013; Chen et al., 2016a; Deng et al., 2015; Hong et al., 2018; Ma et al., 2018; Mao et al., 2019; Qin et al., 2017; Shao et al., 2018; Wang et al., 2019). In contrast, GOLD FISH adds DNA cleavage as a prerequisite for efficient labeling (FIG. 6A). Cas9's cleavage specificity is much higher than its stable binding specificity (Singh et al., 2016; Sternberg et al., 2015; Sternberg et al., 2014). This could explain our observation that GOLD FISH shows excellent labeling specificity and avoids high nuclear background even when it targets non-repetitive loci.

[0251] Conventional DNA FISH denatures genomic DNA globally by heat and concentrated formamide treatments to enable probe hybridization. In contrast, GOLD FISH locally denatures targeted chromatin under much milder experimental conditions as we demonstrated through several examples. Targeted chromatin denaturing also reduces the likelihood of non-specific binding of FISH probes to the genome. CO-FISH and RASER FISH are DNA FISH methods that do not require heat denaturation, and RASER FISH has been used for super-resolution imaging of chromatin conformations (Brown et al., 2018; Williams and Bailey, 2009). However, CO-FISH and RASER FISH non-specifically and globally digest genomic DNA for probe hybridization, and require an overnight BrdU treatment in live cells prior to cell fixation (Brown et al., 2018; Williams and Bailey, 2009). BrdU may alter DNA stability, transcriptional/translational level, and lengthen the cell cycle (Taupin, 2007). In contrast, GOLD FISH does not require any treatment in live cells before cell fixation and therefore can also be applied to patient tissue samples as we demonstrated using human breast cancer tissue. The mild conditions also allow rapid GOLD FISH on tissue samples fixed by a non-crosslinking fixative. The HER2 GOLD FISH experiment in the 10-μm-thick non-crosslinking-fixed tissue sections took only 6 hours, while conventional HER2 DNA FISH in 2-μm-thick non-crosslinking-fixed tissue sections requires days (Oberauner-Wappis et al., 2016).

[0252] We have optimized the pipelines of guide-RNA and FISH probe synthesis to make GOLD FISH easy to implement and cost-effective. The oligonucleotide probes of GOLD FISH for targeting a few kilobases of non-repetitive genomic DNA were synthesized using an enzymatic approach (Gaspar et al., 2017). Oligonucleotides without any labeling or modification were purchased, and desired fluorophores were conjugated to the 3′ end of each oligonucleotide by using terminal deoxynucleotidyl transferase (TdT) (Gaspar et al., 2017). Each set of probes was labeled in a single TdT reaction. Ideally, a guide-RNA set for GOLD FISH targeting non-repetitive DNA sequences should have an equal amount of each guide-RNA species. However, the in vitro synthesis efficiencies of different canonical crRNAs can be dramatically different (FIG. 10B), likely because T7 transcription is sensitive to the first two or more nucleotides of the template DNA. This would cause different crRNA species to be present at different concentrations if transcribed together. In this case, different guide-RNA species must be synthesized individually, then combined in equal amounts, which is labor-intensive. To overcome this challenge, we adopted 5′ extended crRNA in most of guide-RNA designs in this study (Kocak et al., 2019). We found different crRNAs with a common 10-nt 5′ extension have similar synthesis efficiencies (FIG. 10B). This scheme enables the synthesis of multiple guide RNAs in a single reaction, giving similar synthesis efficiencies (therefore similar concentration) across the pool. Cas9 and Rep-X can be produced in large scales in terms of the amounts needed for GOLD FISH (Arslan et al., 2015; Jinek et al., 2012).

[0253] GOLD FISH has less stringent specificity requirements for designing FISH probes. Nonspecific annealing of probes to the rest of the genome is not a major concern because of targeted local denaturing of the genome. In contrast, conventional DNA FISH has stringent requirements to avoid annealing to the globally denatured genome. Therefore, GOLD FISH enables similar or higher probe density compared to the state-of-the-art. DNA FISH methods such as OligoMiner and iFISH (FIG. 10C) (Beliveau et al., 2018; Gelali et al., 2019). The higher probe density of GOLD FISH enabled efficient detection of a non-repetitive locus as short as 2.3 kb in human genome using epifluorescence microscopy (FIG. 3A). We have demonstrated GOLD FISH can ‘paint’ the X chromosome with differently colored fluorophores using the primary probes and readout probes (FIG. 4C), which is the scheme originally developed for multiplexed FISH experiments (Chen et al., 2015; Mateo et al., 2019; Wang et al., 2016). GOLD FISH differs from traditional DNA FISH only in the denaturation step, and therefore should be readily extendable to highly multiplexed FISH experiments.

[0254] It is intriguing how far Rep-X can unwind from the loading site in the complex and dense nuclear environment. The MUC4-NR data in FIG. 3 show that the distance between the guides and the FISH probes impacts the signal. When the distance between each FISH probe and the first ‘upstream’ guide for the probe is less than 400 bp, 89% cells showed 2-4 foci (FIGS. 3A and 3B). However, when the distance is on average 1.2 kb, only 39% cells showed 2-4 foci (FIGS. 3D and 3E). When the distance is ˜30 kb, 91% cells did not have detectable focus (FIGS. 3F and 3G). For other tested loci (MUC4-R, TAD5, TAD37, HER2 and RARA) which gave excellent signals, the distance between each FISH probe and the first ‘upstream’ guide of the probe was less than 400 bp. The data suggest that Rep-X should be able to efficiently unwind ˜400 bp, and larger distance between FISH probes and guides may lead to decreased labeling efficiency. Systematic investigation in the future may reveal the extent of unwinding more precisely and whether it depends on the chromatin environment.

[0255] GOLD FISH uses Cas9_{dHNH} RNP to create a 3′ flap for Rep-X loading. Therefore, the target locus should have enough sites that can be cleaved by Cas9 (e.g. nine Cas9 cleavage sites were sufficient for targeting MUC4-NR). The labeling efficiency of GOLD FISH may be compromised if crRNA has very low on-target activity (e.g., crRNA targeting a protospacer with very low or high GC content should be avoided) (Wang et al., 2014). The presence of nucleosomes and epigenetic modifications may also affect the ability of Cas9_{dHNH} to access and cleave target DNA, therefore influencing the labeling efficiency (Chen et al., 2016b; Horlbeck et al., 2016; Yarrington et al., 2018). crRNA designing tools with on-target activity prediction might be helpful (Cui et al, 2018). Because GOLD FISH uses oligonucleotide probes for hybridization with sequences of interest, targeting sequences that can form complexed structures such as G-quadruplex might lead to decreased labeling efficiency. Repeated sequences should not be problematic as potential target loci as long as there are PAM sequences for Cas9 targeting, as we have demonstrated for the MUC4-R repetitive locus (FIG. 2). The ‘difficult’ sequences mentioned above, and other repeated sequences may be tested in future studies to develop a robust guideline for GOLD FISH.

[0256] We unambiguously identified the HER2 amplification in the patient tissue sample using GOLD FISH (FIG. 5F), but it is possible that we underestimated the HER2 and RARA copy numbers in some cells. For example, two copies of HER2 loci are spatially within the diffraction limit resolution of epifluorescence microscopy cannot be distinguished. Combination of GOLD FISH with super-resolution microscopy would allow more accurate measurements of the gene copy numbers.

[0257] GOLD FISH does not require global heat denaturation of genomic DNA, which potentially improves the preservation of chromatin structures. However, crosslinking fixatives are not compatible with GOLD FISH. GOLD FISH of MUC4-NR did not show detectable signals in paraformaldehyde (PFA)-fixed cells (FIG. 10D), likely because the PFA crosslinking interfered with Cas9 finding its target DNA and/or because Rep-X cannot translocate/unwind long enough along the genomic DNA in PFA-fixed cells. Therefore, we used two non-crosslinking fixation methods in this work. The first method was MAA fixation (FIGS. 2 and 3). The second method was BE70-MAA fixation (FIGS. 4 and 5). We showed that the cells fixed using BE70-MAA had minimal reduction in projected nuclear area (FIGS. 8A and 8B), and the GOLD FISH-measured spatial distances between TAD5 and TAD37 were close to previously reported values measured using conventional DNA FISH (FIG. 4B) (Wang et al., 2016). But it is possible that some ultra-fine chromatin structures may be altered by BE70-MAA fixation. Further electron microscopy- or super-resolution microscopy-based study is required to assess the ultra-fine structure preservation of chromatin in GOLD FISH.

### Experimental Model and Subject Details

### Human Cell Lines

[0258] IMR-90 human female diploid fibroblast cells were purchased from American Type Culture Collection (ATCC, CCL-186) and cultured at 37° C. in 5% C02 in EMEM (ATCC, 30-2003) with 1 mM sodium pyruvate and 10% fetal bovine serum (FBS, ThermoFisher). IMR-90 cell line authentication was performed by the vendor. HEK293ft human female cells were a generous gift from the Regot lab (Johns Hopkins University School of Medicine). HEK293ft cell line authentication was not performed. HEK293ft cells were cultured at 37° C. in 5% C02 in DMEM (Corning) with 4.5 g/L glucose, L-glutamate, 1 mM sodium pyruvate, 1× antibiotic antimycotic solution (Sigma-Aldrich), and 10% FBS. Imaging dishes were coated with 1 μg/cm² fibronectin for 60 min, then washed with PBS before plating.

### Human Tissue Samples

[0259] Human breast cancer primary patient tissue was procured from ProteoGenex, which collected the samples with informed consent from the donor and approved by the Institutional Review Board/Independent Ethics Committee (IBR/IEC). The donor was 57 years old, female, with a breast cancer grade of G3. Samples were positive for estrogen receptor, progesterone receptor, and HER2 expression by immunofluorescence. We embedded the tissue in OCT media, froze it, sectioned it to 10 μm (OTF5000 cryostat—Bright Instruments), and adhered it collagen coated 21 mm² glass coverslips for imaging.

### Method Details

### Cas9 Expression and Purification

[0260] The expression plasmid of Cas9_{dHNH} (i.e. Cas9 (H840A)) was a gift from Jennifer Doudna (Addgene plasmid #39316; http://n2t.net/addgene:39316; RRID:Addgene 39316). To express and purify the Cas9, the plasmid was transformed into E. coii strain BL21 Rosetta 2 (DE3) (EMD Biosciences). The cells were grown in Terrific Broth (TB) at 37° C. to an optical density at 600 nm of 0.6. At this point IPTG was added to a final concentration of 0.5 mM to induce expression. Cells were left at 18° C. overnight (12-16 hrs) and harvested the next day. Cells were resuspended in lysis buffer (50 mM Tris, pH 7.5, 500 mM NaCl, 5% (v/v) glycerol and 1 mM TCEP) supplemented with protease inhibitor cocktail (Roche) and with Lysozyme (Sigma Aldrich). Cells were then lysed using an Emulsiflex-C5 homogenizer (Avestin). Insoluble material was pelleted at 18,000 rpm for 30 minutes at 4° C. and soluble lysate was collected and incubated with IMAC nickel affinity resin (Bio-Rad) for 30 minutes at 4° C. with gentle agitation. Resin was collected and washed in a column with 500 ml of lysis buffer. Resin was then incubated with lysis buffer supplemented with 250 mM Imidazole and first 10 ml of elute was collected. Removal of the 6His-MBP tag was performed by addition of 1 mg of TEV enzyme to the elute, incubated at 4° C. for 1 hour with no agitation. Sample was then introduced to IMAC resin again and the flow-through was collected and run over a HiLoad 26/600 S200 Superdex column (GE Healthcare) equilibrated with a buffer containing 100 mM potassium chloride, 20 mM tris pH 7.5 (at 25° C.), 5 mM magnesium chloride, and 5% (v/v) glycerol. Sample was then collected, concentrated with centrifugation columns, and then flash frozen in liquid nitrogen to be stored at −80° C. until further use. dCas9 was a generous gift from the laboratory of Jennifer Doudna (University of California, Berkeley).

### Rep-X Expression and Purification

[0261] Rep-X was prepared as previously described (Arslan et al., 2015). pET28a(+) vector containing rep (C18L/C43S/C167V/C612A/S400C) was transformed into E. coli B21(DE3) (Sigma-Aldrich, CMC00014) and plated out on LB agar containing 50 μg/ml kanamycin at 37° C. overnight. From the plate, a single colony was grown in 5 ml TB medium containing 50 μg/ml kanamycin at 30° C. overnight. The cells were transformed into 500 ml of TB medium containing 50 μg/ml kanamycin and grown at 37° C. When OD reached the range between 0.3 and 0.4, the cells were moved to an 18° C. incubator. When OD reaches 0.6 to 0.8, the cells were induced expression with 0.5 mM IPTG and continue growth overnight. The cells were harvested by centrifugation for 15 min at 5000 rpm and 4° C. The pellet was resuspended in 40 ml of the lysis buffer (50 mM Tris-HCl pH 7.5, 5 mM Imidazole, 200 mM NaCl, 20% (w/v) sucrose, 15% (v/v) glycerol, 17.5 ug/ml PMSF, and 0.2 mg/ml Lysozyme) and sonicate to lyse the cells. The lysed cell mix was centrifuged at 14,000 rpm at 4° C. for 30-60 min and collect the supernatant. The supernatant was stir-mixed with pre-equilibrated Ni-NTA resin for 1.5 hours at 4° C. Ni-NTA purification was performed by washing the protein-bound resin with buffer A (50 mM Tris-HCl pH 7.5, 5 mM Imidazole, 150 mM NaCl, 25% (v/v) glycerol), followed by buffer A1M (50 mM Tris-HCl pH 7.5, 5 mM Imidazole, 1 M NaCl, 25% (v/v) glycerol) to remove any DNA residue, and final washed the protein-bound resin with buffer A, then eluted the Rep variant with imidazole buffer (50 mM Tris-HCl pH 7.5, 205 mM Imidazole, 150 mM NaCl, 25% (v/v) glycerol). 20 μM eluted Rep variant was mixed with 100 μM BMOE crosslinker to self-crosslink into Rep-X. The reaction was stir-mixed at room temperature for 1 hour. The excess crosslinker and Imidazole was removed by an overnight dialysis and stored in Rep-X storage buffer (50% glycerol, 600 mM NaCl, 50 mM Tris-HCl pH 7.5) at −80° C.

### Preparation of Nucleic Acids for Single-Molecule Assays

[0262] DNA oligonucleotides were purchased from Integrated DNA Technologies (IDT). Cy5 N-hydroxysuccinimido (NHS) dyes were conjugated to DNA through a thymine modified with an amine group through a C6 linker (/iAmMC6T/). dsDNA targets were assembled by mixing the target strand (TS), non-target strand (NTS) and a 22-nt biotinylated adaptor strand at 1:1.25:1 ratio in T50 buffer (10 mM Tris-HCl pH 8, 50 mM NaCl) and incubating at 95° C. for 1 min, then cooling down to room temperature over 1 hour. The polyethylene glycol (PEG)-passivated flow chamber surface was purchased from Johns Hopkins University Slide Production Core for Microscopy. crRNA and tracrRNA were synthesized in vitro using HiScribe™ T7 Quick High Yield RNA Synthesis Kit (NEB, E2050S) according to the manufacturer's instructions. The guide RNA was annealed by mixing crRNA and tracrRNA at 1:1.25 ratio in Nuclease Free Duplex Buffer (IDT), and incubating at 95° C. for 30 seconds, then slowly cooling down to room temperature over 1 hour. The DNA and RNA sequences are listed in ‘Key Resources Table’.

### Microscopy and Data Acquisition for Single-Molecule Assays

[0263] Microscopy was performed on Nikon Eclipse Ti microscope and custom prism type TIRFM module. The system was driven by home-built software (smCamera 2.0). Nikon 60×/1.27 NA objective (CFI Plan Apo IR 60XC WI) was used. Illumination was provided by solid-state lasers (Coherent, 641 nm) combined and coupled to an optical fiber. Emission was collected using long-pass filters (T540LPXR UF3, T635LPXR UF3, T760LPXR UF3) and a custom laser-blocking notch filter (ZET488/543/638/750M) from Chroma. Images were recorded using an electron-multiplying charge-coupled device (EMCCD; Andor iXon 897).

### Single-Molecule Fluorescence Imaging and Quantification

[0264] For the DNA helicase invasion assay, Cy5-labeled dsDNA target (with 22-nt biotinylated adaptor strand) was immobilized on the PEG-passivated flow chamber surface using NeutrAvidin-biotin interaction. 100 nM Cas9 RNP was assembled by mixing 100 nM Cas9 and 100 nM wild-type gRNA and incubating for 10 min at room temperature in Mg²⁺-containing imaging buffer (20 mM Tris-HCl pH 8, 100 mM KCl, 5 mM MgCl₂, 5% (vol/vol) glycerol, 0.2 mg/ml BSA and saturated Trolox (>5 mM), 0.8% (w/v) dextrose) supplied with GLOXY (1 mg/ml glucose oxidase, 0.04 mg/ml catalase). The Cas9 RNP was flowed into the DNA-immobilized chamber and incubated for 20 min at room temperature. Short movies of 10 frames at 10 Hz with 641 nm laser excitation were taken at 20 different imaging views. The first 5 frame of each movie were averaged and Cy5 spot number per imaging view was measured as 0 min time point data. Then 100 nM Rep-X with 1 mM ATP in Mg²⁺-containing imaging buffer supplied with GLOXY were flowed into the chamber. The Cy5 spot number per imaging view was measured from 20 different imaging areas each again at different time points after flowing in Rep-X.

### Genome Sequences

[0265] The human genome assembly hg38 was used in this study and downloaded from genome.ucsc.edu. The coordinates of non-repetitive loci are listed below:
[0266] MUC4-NR (Chr3:195808789-195811123)
[0267] TAD5 (ChrX:18579431-18584379)
[0268] TAD37 (ChrX:143999562-144006499)
[0269] HER2 (Chr17:39706827-39710552)
[0270] RARA (Chr17:40348168-40355149)
   The coordinates of target sequences for p-arm/q-arm of ChrX ‘paint’ are listed in Table 2. (Table 2 follows claims section below.)

### Cas9 Binding Site and Probe Design for GOLD FISH

[0271] For GOLD FISH against a short target region (<10 kb), all potential Cas9 binding sites (i.e. all PAM sequences) within the target region were found using Benchling (benchling.com). Cas9 binding sites were chosen manually with the following constraints: adjacent Cas9 binding sites were generally spaced by 50 to 300 bp; all guide RNAs hybridized to the same strand (i.e. FISH-TS, FIG. 1B) so that Rep-X would translocating in the same direction along the other strand (i.e. Rep-X translocating strand, FIG. 1). The average spacing between consecutive Cas9 binding sites for MUC4-NR, TAD5, TAD37, HER2 and RARA are 266 bp, 166 bp, 163 bp, 93 bp and 188 bp, respectively. We arranged Cas9 binding sites relatively close to each other to increase the likelihood that Rep-X could peel off the Rep-X translocating strand between the two adjacent Cas9 binding sites (FIG. 1). Next, desired oligonucleotide probes against the FISH-TS were designed using Oligoarray 2.1 (FIG. 1B) (Rouillard, 2003). The DNA sequences between adjacent Cas9 binding sites were loaded into Oligoarray 2.1 with the following constraints: Length: 18- to 30-nt; Tm: 72° C. to 90° C.; % GC: 30-70; Max. Tm for structure: 54° C.; Min. Tm to consider X-hybrid: 54° C.; and there was no consecutive repeat of 5 or more identical nucleotides. For MUC4-R and MUC4-NR probes, no specificity filtering was performed. For TAD5, TAD37, HER2 and RARA, two specificity filters were applied: Probes with more than 30 non-specific bindings on human genome were removed; Probes that can non-specifically bind to human noncoding RNA and E. coli tRNA were also removed. We applied the probe filtering for the following reasons. First, if Cas9 and Rep-X non-specifically unwound a stretch of repetitive genomic DNA, and a probe that could non-specifically bind to the repetitive genomic DNA might give a detectable false positive signal. Second, RNA molecules in the cells might not be digested completely by RNAse. Probes annealing to abundant RNA (e.g. rRNA) or RNA molecules containing repetitive sequences might also give false positive signals. Third, E. coli tRNA was used as a blocking reagent. Forth, probe density remained high although the specificity filtering was applied (FIG. 0C). The excellent signal-to-background ratio with MUC4-NR GOLD FISH indicates the probe specificity filtering was not necessary in terms of keeping nuclear background low (FIGS. 3A and 3B). The colocalization of MUC4-R and MUC4-NR signals suggests false positive signal was rare even without the probe specificity filtering (FIG. 3C). The sequences of probes and template DNA for crRNA synthesis are listed in Table 1.

TABLE 1

| Template DNA for in vitro | |
|---|---|
| transcription of crRNAs | sequence (5′ −> 3′, template strand) |
| MUC4 repetitive region | caaaacagcatagctctaaaactcttcctgtcaccgacactctatagtgagtcgtattaatttc |
| (MUC4-R) | |
| MUC4-NR guide-RNA set 1 | acagcatagctctaaaactccagacatcgccgggctgctatagtgagtcgtattaatttc |
| (FIG. 3A) | acagcatagctctaaaacccttgtcgcttcccttgctctatagtgagtcgtattaatttc |
| | acagcatagctctaaaaccaaagactcagacacccagctatagtgagtcgtattaatttc |
| | acagcatagctctaaaaccttcaccagcatggcttctctatagtgagtcgtattaatttc |
| | acagcatagctctaaaacccacgtcctcacggtgggactatagtgagtcgtattaatttc |
| | acagcatagctctaaaacaccgttcaccactgcttttctatagtgagtcgtattaatttc |
| | acagcatagctctaaaacggtcagatgtgtgggtgccctatagtgagtcgtattaatttc |
| | acagcatagctctaaaactgtctagcccacctctgtcctatagtgagtcgtattaatttc |
| | acagcatagctctaaaacggagcacagtggggtttccctatagtgagtcgtattaatttc |
| MUC4-NR guide-RNA set 2 | acagcatagctctaaaacatgaagagcctaagactccctatagtgagtcgtattaatttc |
| (FIG. 3D) | acagcatagctctaaaacggttcaatcaccctccttcctatagtgagtcgtattaatttc |
| | acagcatagctctaaaactagatgaagggatatgaccctatagtgagtcgtattaatttc |
| | acagcatagctctaaaacttgcaaacccacaggaagcctatagtgagtcgtattaatttc |
| | acagcatagctctaaaactcggggtccgttcatgcagctatagtgagtcgtattaatttc |
| | acagcatagctctaaaacagggcgtgggggactcacctatagtgagtcgtattaatttc |
| | acagcatagctctaaaactagcaatgaagacacaaatctatagtgagtcgtattaatttc |
| | acagcatagctctaaaacgtgctgtgtcctagaacaactatagtgagtcgtattaatttc |
| | acagcatagctctaaaacagattttagtgccaagagactatagtgagtcgtattaatttc |
| | acagcatagctctaaaaccatgtgcagttgagaacatctatagtgagtcgtattaatttc |
| | acagcatagctctaaaacttcgaaatgcagctctcagctatagtgagtcgtattaatttc |
| TAD5 | acagcatagctctaaaacccctttatacattacagtgctatagtgagtcgtattaatttc |
| | acagcatagctctaaaaccaattttaatgctgattcactatagtgagtcgtattaatttc |
| | acagcatagctctaaaacaatttgggaaataatgactctatagtgagtcgtattaatttc |
| | acagcatagctctaaaactcgaggtgagtatgagattctatagtgagtcgtattaatttc |
| | acagcatagctctaaaactatctccttttctatcaccctatagtgagtcgtattaatttc |
| | acagcatagctctaaaacagtgatataagagaactcactatagtgagtcgtattaatttc |
| | acagcatagctctaaaacctattggcactcatgtctcctatagtgagtcgtattaatttc |
| | acagcatagctctaaaactgcataaaggtcataattactatagtgagtcgtattaatttc |
| | acagcatagctctaaaacgataatctttcttgcactgctatagtgagtcgtattaatttc |
| | acagcatagctctaaaacatacacaaatgcacaaggactatagtgagtcgtattaatttc |
| | acagcatagctctaaaactatcaagattgttggtagcctatagtgagtcgtattaatttc |
| | acagcatagctctaaaacaccacatcttcataacatcctatagtgagtcgtattaatttc |
| | acagcatagctctaaaacgtaaatataatgctagctactatagtgagtcgtattaatttc |
| | acagcatagctctaaaaccagttttctattcaaattactatagtgagtcgtattaatttc |
| | acagcatagctctaaaacggtacttacagaattaattctatagtgagtcgtattaatttc |
| | acagcatagctctaaaacatatgcccaatatctaatgctatagtgagtcgtattaatttc |
| | acagcatagctctaaaactctaaatgttcaatgaatgctatagtgagtcgtattaatttc |
| | acagcatagctctaaaacaacctgtatgctgaaaaatctatagtgagtcgtattaatttc |
| | acagcatagctctaaaacgtgtagcaaatggaagcatctatagtgagtcgtattaatttc |
| | acagcatagctctaaaacaaatttataaagaatgtacctatagtgagtcgtattaatttc |
| | acagcatagctctaaaacgtccgtgattgtgattactctatagtgagtcgtattaatttc |
| | acagcatagctctaaaactagcaaggacttcctaattctatagtgagtcgtattaatttc |
| | acagcatagctctaaaactttcattttaagaaacagtctatagtgagtcgtattaatttc |
| | acagcatagctctaaaacctaatattctcagtcattactatagtgagtcgtattaatttc |
| | acagcatagctctaaaactctacaatatgctagtttgctatagtgagtcgtattaatttc |
| | acagcatagctctaaaacggttttctttagcatagtgctatagtgagtcgtattaatttc |
| | acagcatagctctaaaaccatgaattattatttctttctatagtgagtcgtattaatttc |
| TAD37 | acagcatagctctaaaactcttgacctaatcacctccctattcatccctatagtgagtcgtattaa |
| | tttc |
| | acagcatagctctaaaactagtatctcatccttggccctattcatccctatagtgagtcgtattaa |
| | tttc |
| | acagcatagctctaaaacgcatctcatctaaatatccttattcatccctatagtgagtcgtattaat |
| | ttc |
| | acagcatagctctaaaacaactacaatggtgtggcaagtattcatccctatagtgagtcgtatt |
| | aatttc |
| | acagcatagctctaaaacacacccatcagggcaaacaatattcatccctatagtgagtcgtatt |
| | aatttc |
| | acagcatagctctaaaaccaaggttctaggtggccctatattcatccctatagtgagtcgtatta |
| | atttc |
| | acagcatagctctaaaacaatggctctactaagcattgtattcatccctatagtgagtcgtatta |
| | atttc |
| | acagcatagctctaaaactgcactctgtgagcctgcaatattcatccctatagtgagtcgtatta |
| | atttc |
| | acagcatagctctaaaaccagatggggcagccaagtagtattcatccctatagtgagtcgtat |
| | taatttc |
| | acagcatagctctaaaacttgagatcattcttccatgttattcatccctatagtgagtcgtattaat |
| | ttc |
| | acagcatagctctaaaactgtgattacaaattccaacttattcatccctatagtgagtcgtattaa |
| | tttc |
| | acagcatagctctaaaaccatcagaatatcctttaccatattcatccctatagtgagtcgtattaa |
| | tttc |
| | acagcatagctctaaaaccattgaaattgccctttatgtattcatccctatagtgagtcgtattaat |
| | ttc |
| | acagcatagctctaaaacttccatgtttataaggtatttattcatccctatagtgagtcgtattaatt |
| | tc |
| | acagcatagctctaaaacgcagattcaatgtctggtgatattcatccctatagtgagtcgtatta |
| | atttc |
| | acagcatagctctaaaacttcatgagggctttgccttctattcatccctatagtgagtcgtattaa |
| | tttc |
| | acagcatagctctaaaacgaacttatttatcttgtgtatattcatccctatagtgagtcgtattaatt |
| | tc |
| | acagcatagctctaaaactatcttggttattgtgaacatattcatccctatagtgagtcgtattaat |
| | ttc |
| | acagcatagctctaaaacccaggatggctaaatagtagtattcatccctatagtgagtcgtatt |
| | aatttc |
| | acagcatagctctaaaacgtatcacacaattaggtcattattcatccctatagtgagtcgtattaa |
| | tttc |
| | acagcatagctctaaaacttgtgaccagaaattgtatttattcatccctatagtgagtcgtattaat |
| | ttc |
| | acagcatagctctaaaaccaatgtttggtgtacatttatattcatccctatagtgagtcgtattaat |
| | ttc |
| | acagcatagctctaaaacgtagcatctgcatctgtttatattcatccctatagtgagtcgtattaat |
| | ttc |
| | acagcatagctctaaaaccactgtggtgggtggaatgatattcatccctatagtgagtcgtatt |
| | aatttc |
| | acagcatagctctaaaactggtagaaattacaggctgatattcatccctatagtgagtcgtatta |
| | atttc |
| | acagcatagctctaaaacttgatgctagaacgtctccatattcatccctatagtgagtcgtatta |
| | atttc |
| | acagcatagctctaaaactcctgctgatgtcattctcctattcatccctatagtgagtcgtattaat |
| | ttc |
| | acagcatagctctaaaacaagcacaaacattcgcaaagtattcatccctatagtgagtcgtatt |
| | aatttc |
| | acagcatagctctaaaacctttctgataatttatcgtctattcatccctatagtgagtcgtattaatt |
| | tc |
| | acagcatagctctaaaactagggagaaggtataacgattattcatccctatagtgagtcgtatt |
| | aatttc |
| | acagcatagctctaaaacgacttttctttgactacaattattcatccctatagtgagtcgtattaatt |
| | tc |
| | acagcatagctctaaaacggtactgtacttggcactggtattcatccctatagtgagtcgtatta |
| | atttc |
| | acagcatagctctaaaacaagtcacatctactctgacttattcatccctatagtgagtcgtattaa |
| | tttc |
| | acagcatagctctaaaacgagataaaattgcttaaagttattcatccctatagtgagtcgtatta |
| | atttc |
| | acagcatagctctaaaactctggaaaaatcatgctatttattcatccctatagtgagtcgtattaa |
| | tttc |
| | acagcatagctctaaaacaagcactggcattcttaatctattcatccctatagtgagtcgtattaa |
| | tttc |
| | acagcatagctctaaaacgatcaagtgaaagggttctttattcatccctatagtgagtcgtatta |
| | atttc |
| | acagcatagctctaaaacccataggtgcactgcttgtttattcatccctatagtgagtcgtattaa |
| | tttc |
| HER2 | acagcatagctctaaaacggtgggtctcgggactggcatattcatccctatagtgagtcgtatt |
| | aatttc |
| | acagcatagctctaaaaccattcatagggctcgtcagttattcatccctatagtgagtcgtatta |
| | atttc |
| | acagcatagctctaaaacgcgtctgcaatttgacaaactattcatccctatagtgagtcgtatta |
| | atttc |
| | acagcatagctctaaaacctctgtatctcagtttcttctattcatccctatagtgagtcgtattaatt |
| | tc |
| | acagcatagctctaaaaccagtacttggagatcttgggtattcatccctatagtgagtcgtatta |
| | atttc |
| | acagcatagctctaaaacctgcagtgggacctgcctcatattcatccctatagtgagtcgtatt |
| | aatttc |
| | acagcatagctctaaaacagagaaggtttcaatgacggtattcatccctatagtgagtcgtatt |
| | aatttc |
| | acagcatagctctaaaacgggccagcaaatagttacattattcatccctatagtgagtcgtatta |
| | atttc |
| | acagcatagctctaaaaccatcactcactagctgtgtatattcatccctatagtgagtcgtattaa |
| | tttc |
| | acagcatagctctaaaactctttgagtcccaccaccactattcatccctatagtgagtcgtatta |
| | atttc |
| | acagcatagctctaaaacctggatcaagacccctcctttattcatccctatagtgagtcgtatta |
| | atttc |
| | acagcatagctctaaaacgagagcggttggtgtctatctattcatccctatagtgagtgtatta |
| | atttc |
| | acagcatagctctaaaaccagagatgaagaggcacaggtattcatccctatagtgagtcgtat |
| | taatttc |
| | acagcatagctctaaaacgagacaggcagtgagagagatattcatccctatagtgagtcgtat |
| | taatttc |
| | acagcatagctctaaaacaagcctgttatcccaccccttattcatccctatagtgagtcgtatta |
| | atttc |
| | acagcatagctctaaaactgcagccggcagcacactgctattcatccctatagtgagtcgtatt |
| | aatttc |
| | acagcatagctctaaaacctgtggttgaagtggaggcatattcatccctatagtgagtcgtatt |
| | aatttc |
| | acagcatagctctaaaaccatatgctcccatttacagatattcatccctatagtgagtcgtattaa |
| | tttc |
| | acagcatagctctaaaacctccctaacacagtcagccatattcatccctatagtgagtcgtatta |
| | atttc |
| | acagcatagctctaaaaccgcatcagcacctgacatcctattcatccctatagtgagtcgtatt |
| | aatttc |
| | acagcatagctctaaaaccttggttgtgcagggggcagtattcatccctatagtgagtcgtatt |
| | aatttc |
| | acagcatagctctaaaacggggtagagagtagaaggcatattcatccctatagtgagtcgtat |
| | taatttc |
| | acagcatagctctaaaaccacctctcgcaagtgctccatattcatccctatagtgagtcgtatta |
| | atttc |
| | acagcatagctctaaaaccatctggatcctcaggactctattcatccctatagtgagtcgtatta |
| | atttc |
| | acagcatagctctaaaactggggcaaccaccgttctgatattcatccctatagtgagtcgtatt |
| | aatttc |
| | acagcatagctctaaaacctgcactccagcctgctgactattcatccctatagtgagtcgtatta |
| | atttc |
| | acagcatagctctaaaactggccccctctggaaaggggtattcatccctatagtgagtcgtatt |
| | aatttc |
| | acagcatagctctaaaacgctctgcagctattgaaagatattcatccctatagtgagtcgtatta |
| | atttc |
| | acagcatagctctaaaacggcgataaagcgagactctgtattcatccctatagtgagtcgtatt |
| | aatttc |
| | acagcatagctctaaaacccatgaatgccttcactcaatattcatccctatagtgagtcgtatta |
| | atttc |
| | acagcatagctctaaaacgtgatctcttccagagtctctattcatccctatagtgagtcgtattaa |
| | tttc |
| | acagcatagctctaaaaccctctttctcagtgctcacttattcatccctatagtgagtcgtattaat |
| | ttc |
| | acagcatagctctaaaacctatgggagaaaggtgggcatattcatccctatagtgagtcgtatt |
| | aatttc |
| RARA | acagcatagctctaaaaccaccactgctggcaggattctattcatccctatagtgagtcgtatta |
| | atttc |
| | acagcatagctctaaaacgacagacaaagcaaggcttgtattcatccctatagtgagtcgtatt |
| | aatttc |
| | acagcatagctctaaaactgcttgctgccaacttccactattcatccctatagtgagtcgtattaa |
| | tttc |
| | acagcatagctctaaaaccctgggtccccagccaagagtattcatccctatagtgagtcgtatt |
| | aatttc |
| | acagcatagctctaaaacggtatacctgcaccctggcatattcatccctatagtgagtcgtatta |
| | atttc |
| | acagcatagctctaaaacttgacctccgtcccacatcttattcatccctatagtgagtcgtattaa |
| | tttc |
| | acagcatagctctaaaacgggatctggaacccacaccctattcatccctatagtgagtcgtatt |
| | aatttc |
| | acagcatagctctaaaaccctcaggagaatcccagtactattcatccctatagtgagtcgtatt |
| | aatttc |
| | acagcatagctctaaaactgggtatggaggggagggagtattcatccctatagtgagtcgtat |
| | taatttc |
| | acagcatagctctaaaaccaactgaggcgggactcggctattcatccctatagtgagtcgtat |
| | taatttc |
| | acagcatagctctaaaacgagcacagacctgcccgtggtattcatccctatagtgagtcgtatt |
| | aatttc |
| | acagcatagctctaaaacctcagaattcaagcccctcctattcatccctatagtgagtcgtatta |
| | atttc |
| | acagcatagctctaaaactgtccagcctttccctcccttattcatccctatagtgagtcgtattaa |
| | tttc |
| | acagcatagctctaaaaccactgccctccccacaaaggtattcatccctatagtgagtcgtatt |
| | aatttc |
| | acagcatagctctaaaactaagcgaagggttccaggcttattcatccctatagtgagtcgtatt |
| | aatttc |
| | acagcatagctctaaaacgacacacaatcactcacaggtattcatccctatagtgagtcgtatt |
| | aatttc |
| | acagcatagctctaaaactgggactggctctgagcagctattcatccctatagtgagtcgtatt |
| | aatttc |
| | acagcatagctctaaaaccatgagcacagctgtggccctattcatccctatagtgagtcgtatt |
| | aatttc |
| | acagcatagctctaaaaccgtccacccccagcctgacatattcatccctatagtgagtcgtatt |
| | aatttc |
| | acagcatagctctaaaacggtgcgctttgcgcaccttctattcatccctatagtgagtcgtatta |
| | atttc |
| | acagcatagctctaaaacgggagctccttgggaagaggtattcatccctatagtgagtcgtatt |
| | aatttc |
| | acagcatagctctaaaaccagtcttaatgatgcacttgtattcatccctatagtgagtcgtattaa |
| | tttc |
| | acagcatagctctaaaacaggacacaggggcagtgccttattcatccctatagtgagtcgtat |
| | taatttc |
| | acagcatagctctaaaacgcacatctggctgctaggtgtattcatccctatagtgagtcgtatta |
| | atttc |
| | acagcatagctctaaaacaggtgaatctttttagtttttattcatccctatagtgagtcgtattaatt |
| | tc |
| | acagcatagctctaaaacaggttccccaccctggaggttattcatccctatagtgagtcgtatt |
| | aatttc |
| | acagcatagctctaaaacggatgaggtacacaacaagctattcatccctatagtgagtcgtatt |
| | aatttc |
| | acagcatagctctaaaacggtcatcctgcctacatgcatattcatccctatagtgagtcgtatta |
| | atttc |
| | acagcatagctctaaaaccaggatctgggtgcagaggatattcatccctatagtgagtcgtatt |
| | aatttc |
| | acagcatagctctaaaactctccgcatcatccatctcctattcatccctatagtgagtcgtattaa |
| | tttc |
| | acagcatagctctaaaactgctgtgtagttgcagaccatattcatccctatagtgagtcgtatta |
| | atttc |
| | acagcatagctctaaaaccccccactgtacagaaacggtattcatccctatagtgagtcgtatt |
| | aatttc |
| | acagcatagctctaaaaccaagcagggagagggttccctattcatccctatagtgagtcgtat |
| | taatttc |
| | acagcatagctctaaaacccccacacagggcagggcattattcatccctatagtgagtogtat |
| | taatttc |
| CEP17 | acagcatagctctaaaacttctttgatagttcaggttctatagtgagtcgtattaatttc |
| | acagcatagctctaaaactagtaaaggaaataacttcctatagtgagtcgtattaatttc |
| GOLD FISH probes | sequence (5′ −> 3′) |
| MUC4 repetitive region | gtggcgtgacctgtggatgctgagg |
| ((MUC4-R) | |
| MUC4 non-repetitive region | tcgtagccccggcattgg |
| (MUC4-NR) | |
| | tcctgccctgcctctcag |
| | aaccccgctccagtgctc |
| | gactcccagagcgaggct |
| | cgcagaggggcaagacct |
| | cagtcaccaagggcgggt |
| | ctggaggactggcagcca |
| | ggagctgccgcaatgagg |
| | ctggccgtcctggttcca |
| | ggctggagcaagtgcagg |
| | agcgcactccacggggaa |
| | agacccctctgcccctct |
| | ccctacacctccccaccct |
| | gatggtcgtggctgggaga |
| | cgagacaggtgagacgcaga |
| | ggccaagtctttgccgtgaa |
| | ggactgttggtgtgcaaggg |
| | cgtggagcgctgagtccttt |
| | aggctgggtcacactgaagc |
| | gctgggtgatggagacggaag |
| | agaagatcgggagacagcagc |
| | cccttccacctcgggatgttt |
| | agctcgggtttaaaagcctccat |
| | catgaactggcagatacgggacaa |
| | gagagaaaagagaacagagggcca |
| | gaaatttggtgtctactggtcgcc |
| | atgccaggcctgtgggagatgttcc |
| | gtccctctggcttcaggaccaagtt |
| | atttcttgggcgcatatttgaggag |
| | acctgcctatacttgagtctagggt |
| | caagggttaaaggataaggcacagc |
| | aggaacagagtcaaggagaaagatgt |
| | ccaagttcttgagtttccaaatctgtgatt |
| | agaggagaaaagtggggaagagg |
| | aagacagagggagaatgctcgaaa |
| | gcagagagaaagacaggcagagc |
| | tcatgtaaagctgcagggtgagag |
| | aggaccctgggaatggagaga |
| | tgggctcctccgtgtacagag |
| | cctcttccccacactttccagg |
| | gttcaagctggggttagagtctca |
| | agaacagtcgccgagggaaa |
| | ggagtgagtcagaaggcgagtgc |
| | aggctgagggcaaaggaaact |
| | tgaaggagtctccacgggaatc |
| | gcagcttggatttaggagcccc |
| | ttctggcccctgtgacca |
| | ccaggaagtggggtctgtgga |
| | cgtgacccggagaaggagtg |
| | cgacccgaagaagctaggcat |
| | tggagctgggccaggaga |
| | cgttccttttggctccctgaag |
| | ttgccggcaggaccctca |
| | tccttaaggaacagccctggc |
| | ccttggtctccagcactatcagtg |
| | accgaggacaccaaaactctcc |
| | ctttatgggcccctcctcggagaa |
| TAD5 | ttttcactctccctaaaggttttcaggcat |
| | taatgctaccccaaataataaccctgtata |
| | aagagcctttttaaacacagtgtgctg |
| | attgttttgctttctatctacaactttctc |
| | gcatctagaataattcatccaatacagagc |
| | cttccagcaattcgagcatattcta |
| | atgtagctttttactttctcaggtgg |
| | gcaccagtgaatagccttgattagct |
| | caaatatttctcatgtcttgcactttca |
| | acaaatgtaaagatctcaccacaatatcc |
| | tctacaattgggagtggatctataatagtt |
| | tccccaagtaagtttcaaagttcac |
| | aggctatagagatcaacattttgctct |
| | gtttcacattacctggtctacctgcag |
| | gaaccacctatataaagcctgattcag |
| | tgaagatacatactggagattgttggt |
| | caacgggcacttttcactaaggggtagag |
| | agtaaaggacaaaacagtttatggga |
| | tttcattgctataaaccacccacttc |
| | aatttgtgtcccactactgtaaaact |
| | atgacctttaaactattctcacaagtga |
| | tttctaggaataaaagacgatggcattc |
| | ccagttgacgtggagatctacc |
| | agactgttactagaatcattaccctagac |
| | ggctcctcattaatatccccaaactacag |
| | gcaaccaatgattcactatgcaca |
| | aaagggcagaggtagtgaaatctgtagatt |
| | cgcaattgtatttttagagtagaataccca |
| | aattatcaatgtctaatgctgaagcca |
| | acatgctttctgttacattcttctacataa |
| | aatataggccaacacatttcaaaaacc |
| | catgcagaccacaacttcaaaaat |
| | acactgttagatcactgtaatagcatcta |
| | ttctggttttatatctggagtgtcaagat |
| | tcctctaccaatttaagtcaaaacataaca |
| | caatttttcaacatgtgactcaaaagaatg |
| | gattaaacctggaacaactatcaacattc |
| | acaattttctactaggagagagtacaact |
| | taatacagagttatctacatgggagacac |
| | gacccatgaccctaacatacaatctaaaa |
| | ggattcttagttatatgtggaggtttacat |
| | gacaatgcctctatttcttgcttgtgtaat |
| | caaaatctttgaaaatactgagtgacaaga |
| | gccacaattaaaatctttcagatccagtat |
| | ttcctgaaaatcataatgctaacaaaatgc |
| | agaaatgccagaccaggagtactcttcct |
| | ttcctgaccatttacaacagtcttttctc |
| | gcgtactctgggagggga |
| | atgtttcttcataagacacgctttgaag |
| | caatcccagcgtaaaacaaaacccctaac |
| | gtacgtcagttttgagacatggaa |
| | ggttcactgtgaatagttatagagaatcag |
| | atcacccatctaactcaccaaacacaacat |
| | taccaattacagactctaccactactttta |
| | agcctttacataaacagtgatggaaacaa |
| | gtatttgcatatgtactgttgctgagcaa |
| | tcagctctoccaataaatgcaaacct |
| | tcccatgcttttataattattcagagca |
| | aaagtccccacaaaagctagaaat |
| | acaatgtattcactacaaaaccagtct |
| | agtagagtgttccatgtcaattgaaag |
| | tctcgcatgggctatttattaataatatcc |
| | gcgctagtaatactttaaacaacatcaaaa |
| | aagatagcaaagtccaaagttgtaact |
| | tgtaattagcattattgccttctgacag |
| | cattctattttgggacggtaactcaccc |
| TAD37 | tacgcttgccaaaaattcatatggt |
| | gcaattttattaggaggttggggat |
| | aaatgagataagactcctggggata |
| | caatttgcttcaagaccaagtgtac |
| | tacttgggaccagctctttctttct |
| | gggaatgggaatgtttgtcctg |
| | ggaaggtggggcattgtaaaaataa |
| | gccgtacctagcaaattcatgga |
| | agccacctctgagatcccagaac |
| | tccaacctgtgaaagcttcaaca |
| | aagagcttgcaagtccagcctgg |
| | aagatgccctagtgcccaggc |
| | actgcagaaatcccacacaag |
| | aagtggtaaagtttgatagcatcca |
| | cagaccaggtgcagcttaggccacc |
| | tctccctgtattccgttgcag |
| | tgccagggcttttgatgcaaaac |
| | cgccaggcgttattcatcaa |
| | ccaagtggacagttcatgagattag |
| | tgactcctaacagtgtaatctgaga |
| | aagaagaggaggtctgcagagatag |
| | aagagcacgctggacaaaagcc |
| | ggaacgggctttgaaattggataa |
| | agacagaaattcataccaggagtgg |
| | ctgtcatgttctacaggaagtcatc |
| | ccagtgcctacaactacaaatactt |
| | gctgatacctaattctgagtgcaat |
| | tatggatggcaaagcatataaagct |
| | actccagaactcgctgaagc |
| | agagcacatttgtcacatgccagag |
| | tgatatcaccaacgaagctcttct |
| | ttgccctttgtgcatacgattagct |
| | cattccagacccctgcaactgattg |
| | actttaagacactttcagtcagctt |
| | tggtctgaacaaacttaggacaaat |
| | cttatggaatgtctcacctgcagat |
| | acagtttaccaagagtcccactaat |
| | cctgacatacactgctagctgatat |
| | cagcatcttgtgtccacatctc |
| | ggagcagtcaggtatagagaaagg |
| | tgagagacaaatgagcacctgg |
| | gcaagatactgcccaggaaact |
| | catagctcagagccaagaaagag |
| | cctgtataacccctcctccaaaag |
| | agaaggcaagtaaaacagtttcact |
| | agtgtttagcccttaaacccctaac |
| | atgtgagcctgggagtcc |
| | ttcatgtgtctcctctgtctagtaa |
| | ttttctatctcttcaaccctgcatt |
| | agcacaaaaccccagagtagctg |
| | gaaccagccatatgaggagacactg |
| | tagacagcctatttagtgaggaagg |
| | cagaacacttgctctgtggtaggaa |
| | cttcttctgcccattccacaaatat |
| | acattgttcaatgaaatgcagcat |
| | tagagaattccctgcagtaaagtgc |
| | agacaaagcacacagagcatatttt |
| | ccatgaaggtaaacgctgactaaaa |
| | ttacacgcatgagaatacaaaccaa |
| | aatgaccttggaattatgcagaact |
| | caagcagttcaaagccaaagc |
| | cattcaccctcgtgctttcaggaat |
| | actttactttgcatgctcactacaa |
| | acacctgccccatggtta |
| HER2 | agtgagtttggatggggtgg |
| | tgctgttaaacctgcagtgtgc |
| | cagacatgaagctgcggc |
| | tgccagcatgatcatgtcccctg |
| | tgtttccgctaaatcttgtgctc |
| | tccacagaccctggaatgg |
| | gagtggaaaccaacctgctg |
| | ccaggcctttgctttcactg |
| | cgggaacaggactgctcagt |
| | ggtagggcgtgatctttatctcta |
| | tgctcatcgctcacaacca |
| | acaataccacccctgtcacag |
| | gtgctagacaatggagacccg |
| | ctctttgaggacaactatgccc |
| | tgagtgaagtgtacagtgaacaac |
| | tgggaagttgtagcttgcgtcagc |
| | gggaagacgccctcagaagattgg |
| | gcttgcagatataagggccaaaa |
| | cagtcacgctgcagtcctgtcagg |
| | gctttgttcttgttgcgggtg |
| | agcatggacaactcactcctc |
| | gagagctgcggtccacatgag |
| | ctcttaaccaccaagcagcatg |
| | gctcaccccacagagatctt |
| | cacaagaacaaccagctggc |
| | gccgcctacaccacccatttc |
| | ctcccaacttacaacccagtg |
| | cctcttctctcagacagcctg |
| | ccgtcctctcgctgttaga |
| | tgctgtgcagttggcctcgtgg |
| | ctctcagcctgtctgggtccct |
| | ctccctctgcttataggttgtgcc |
| | aatgcaggtgtcatacaggtga |
| | attgtcagagccgtgagtctca |
| | gttctccgatgtgtaagggctc |
| | cactgtctgtgccggtgg |
| | ggcgccactcagccctcat |
| | gtctccctagaaggtgatgctga |
| | tgaaagccagccacctgt |
| | ggcacaccagggcaaaac |
| | ctgcctggtactgccctat |
| | ctttgtgcccaatgtgctcta |
| | tctgactgcctggtatgtgcc |
| | tcattttggtggggaggtttg |
| | ccagctgtgtgactgcctgtc |
| | gtccatgcccaatcccgaggg |
| | tcacctacaacacagacacgt |
| | caggagtgggccttcagat |
| | ctgggctcagacctggggaac |
| | cacctatttactgatgggcgttta |
| | tctggttgttgtgaggggtaa |
| | tgggaatctcacagtgctgat |
| | ctcactagcacaatgaccttgaat |
| | gtgggatcctgcaccctc |
| | cctgatctccttagacaactacct |
| | tgcacgaagggccagggtatgtgg |
| | agttcctgtccctctgcgcatgc |
| | gtgcccgaggtacccactcactg |
| | gcagaggatggaacacagcggtg |
| | tcagtgtgctatggtctggg |
| | tgagacggccccttccccac |
| | tgttgacctgtcccggtatg |
| | gcccggaccctgatgctcat |
| | ggcacgatgacctgagacagtg |
| | cggagagctttgatgggtaaga |
| | agaagatctttgggagcctggc |
| | cagttaccagtgccaatatccag |
| | ctttatgtgaggctctgaaccg |
| | tgctctgtatagtgattggggtag |
| | ggaggcacacaaggacatttctgg |
| | cctttcacacttcctttacctcca |
| | tggttttcgtcgttttggtgggga |
| | acctagaccgtttatgcatctgta |
| | gaacatgggccagtgtctccctag |
| | acaaacagttccactttgtgtgtg |
| | gatgggaacagctgggct |
| | actaaggcctgggctttga |
| | tgctgggagtgatgtccaccc |
| | tacatctcagcatggccggacagc |
| | cactcctttaatctcaccctctgc |
| | ggaaggggtccgtggtaa |
| | ttccatgaaagtctgcagagtgtg |
| | gctttgggcctgagggagtactcc |
| RARA | gggagtcccagttttcttaagac |
| | tctgaagagatagtgcccagc |
| | agccattgagacccagagcag |
| | ggtctctaactgcccctcccc |
| | gagggacggtgaggcagggtgga |
| | cagcttgatgaggtcaatgggat |
| | gagttgaaggggtcattgggaag |
| | gtgagctggctgccgact |
| | tccagctggcagggcgta |
| | acagtttccccacaggtcct |
| | ccctgcctgaacctcaccatgg |
| | ttcagcctggagtagctatcc |
| | ccagcccgtgtatctgcctcctgg |
| | gtgtgtgttcgcctccatttctct |
| | catcctgcagtgttgaggc |
| | tgagaccgtagccaggcac |
| | gctcaggtaggcgatgggc |
| | ggagtgtgagtgccataggg |
| | gtttgcgagtctggctgg |
| | tggtgtgcgggctcacggttgag |
| | cagatgctcctaaagaccaaggg |
| | agtcccttctgattgtgagtctta |
| | caggccgtgcttggttttggggtg |
| | ggaagaaagaattgggacttctca |
| | ggatccaaaagccattgtctagtt |
| | ccatggagcctgagcctt |
| | cgcctccttgtctgcgtg |
| | ccggtgattgatgatgtcagagat |
| | tgtgttgaatcatgggtgttgcca |
| | gtgggtgacaactcaagacc |
| | actggagtgtcctgccacag |
| | ttgcacgaagagccccagac |
| | ggcacgggtgagatggttct |
| | cgtcagcagccaccacca |
| | gtgatctccaaattatgccagcta |
| | tcccctgcactttattgaatttgc |
| | ccgaatgataaacgtcttgtcaca |
| | agcagctgccatttcaatagaatt |
| | actccccacttgccccag |
| | agattctccccgccaggt |
| | gtggtgtgtgcggctcagcg |
| | cgaccccatcgcttctttaaa |
| | ctggctatggggtggggt |
| | gagctggagtagacgcgt |
| | agggctgggtgagtggaggc |
| | cccgtgaacgcgtgctgtgt |
| | gctggagtgcgtggcaatgc |
| | aacttgatgtgtgggttggg |
| | tacacgctgacgccggag |
| | tgcccaagcccgagtgct |
| | gcaagatctctgcgtccttcc |
| | gcctgcagggtgggatttgcc |
| | gcaaatacactacggtatggcttt |
| | acgtgtctctctggacattgacc |
| | gaccagatcaccctcctcaa |
| | cggcttcaccaccctcacca |
| | tgcccaccgcccaaatgtctgc |
| | tccttccagccagacagccaccct |
| | ataaagattcacgtaggagccagg |
| | cagccatccatccatttagccagt |
| | aagggctcggtccacctgtt |
| | gggaactgccaaagcctagg |
| | ggaggtttagattgtgctgcctgc |
| | tgaatgttgaggcgggtgatgggt |
| | ccagtgttccttagctcctagaaa |
| | ggttcgggttcagtccctgaa |
| | gtgctggtgccgagtgctcag |
| | tggtcctccgggagtgctggt |
| | ttcgccaaccagctgctg |
| | ggtatctctagagggcaggg |
| | cctggccgatgcatgaccctg |
| | gagggtcggaccaaccagggt |
| | tccagtgcttgttagttgctattt |
| | aggattacggtggtaacagatact |
| | ggtctctagctcatgaagttgatg |
| | tctgtaccctgcggcagc |
| CEP17 | taggcctcaaagaagtgcaattat/3cy3 sp/ |
| ssDNA used in hybridization | |
| buffer | sequence (5′ −> 3′) |
| Poly dT single-stranded DNA | ctagtttttttttttttttttt tttttttttttt |

[0272] For p-arm/q-arm of ChrX ‘paint’, Cas9 binding sites were found using custom-written scripts. The Cas9 binding sites were restricted within the central 300-kb regions of TADs in ChrX in IMR-90 cells (Dixon et al., 2012). All guide RNAs hybridized to the same strand (i.e. FISH-TS, FIG. 1B) so that Rep-X would translocating in the same direction along the other strand (i.e. Rep-X translocating strand, FIG. 1i). To increase the likelihood that Rep-X could peel off the Rep-X translocating strand (FIG. 1i), most of adjacent Cas9 binding sites were spaced by 50 to 200 bp. 50 to 100 Cas9 binding sites were designed for each TAD. Next, desired oligonucleotide probes against ChrX were designed (FIG. 4C). The probes were designed as previously described (Wang et al., 2016), with the following modifications: each primary probe contains 4 regions: a 20-nt forward priming region, a 20-nt readout region, a 20-nt encoding region for hybridization to genomic DNA and a 20-nt reverse priming region (FIG. 4C). To generate the encoding region sequences, the sequences between adjacent Cas9 binding sites (which spaced less than 200 bp) were loaded into Oligoarray 2.1 with the following constraints: Length: 20 nt; Tm: 72° C. to 90° C.; % GC: 30-70; Max. Tm for structure: 54° C.; Min. Tm to consider X-hybrid: 54° C.; and there was no consecutive repeat of 5 or more identical nucleotides; The generated encoding region sequences with more than 10 non-specific bindings on human genome or can bind to human non-coding RNA were removed. To generate the priming regions and readout region, computationally designed 25mer sequences (Xu et al., 2009) were loaded into Oligoarray 2.1 with the following constraints: Length: 20 nt; Tm: 75° C. to 90° C.; % GC: 40-60; Max. Tm for structure: 54° C.; Min. Tm to consider X-hybrid: 54° C.; and Sequence to avoid in the oligo: ‘GGGG;CCCC;TTTT;AAAA;ATATAT;TATATA;ACACAC;CACACA;CGCGCG;GCGCGC’; The generated priming region sequences and readout region sequences with at least 1 non-specific binding on human genome were removed. Amount thousands of candidate sequences satisfying all the constraints, four sequences were chosen as the priming regions and readout regions in this study (2 sequences for the priming regions and 2 sequences for the readout regions). Finally, the primary probes were assembled using the encoding region sequences, priming region sequences and readout region sequences as indicated in FIG. 4C. The primary probes with at least 9 non-specific bindings to human genome or at least one non-specific binding to E. coli tRNA or human non-coding RNA were excluded using BLAST+(here a ‘non-specific binding’ refers to the primary probe contains >16 nt homology sequence to an off-target sequence). The sequences of primers and template DNA for synthesizing the primary probes and the crRNAs are listed in Table 2. The sequences of readout probes are also listed in Table 2.

### Preparation of Guide RNAs for GOLD FISH

[0273] For GOLD FISH against a short target region (<10 kb), template DNA for in vitro transcribing crRNAs were purchased from IDT. The template DNA of a crRNA was partially double stranded, including a double-stranded T7 promoter region and a single-stranded template region (FIG. 10B). crRNAs were transcribed using HiScribe™ T7 Quick High Yield RNA Synthesis Kit (NEB). Different crRNAs have different protospacer sequences at 5′ end, and we found the transcription efficiency of crRNA heavily depends on its 5′ end sequence. Therefore, different crRNA would have different transcription efficiencies (FIG. 10B). To make the transcription efficiency homogeneous for different crRNA, we adopted 5′ extended crRNA (Kocak et al., 2019). A common 10-nt extension at 5′ of each crRNA made the transcription efficiency homogeneous (FIG. 10B). For MUC4-R, MUC4-NR, TAD5 and CEP17, canonical crRNAs were used, and each crRNA was transcribed separately. For TAD37, HER2 and RARA, the 5′ extended crRNAs were used, and each set of crRNAs were transcribed together in a single reaction. The transcribed crRNAs were purified by polyacrylamide gel electrophoresis.

[0274] For p-arm/q-arm of ChrX ‘paint’, an oligopool of template DNA (Twist Bioscience) was amplified to a dsDNA pool using Phusion® Hot Start Flex 2× Master Mix (NEB, M0536S) by limit-cycle PCR (no more than 10 cycles). The crRNAs for ChrX ‘paint’ was in vitro transcribed using the dsDNA pool and HiScribe™ T7 Quick High Yield RNA Synthesis Kit (NEB). The synthesized crRNA was purified using RNA Clean & Concentrator Kits (Zymo, R1017).

[0275] To assemble guide RNAs, the Alt-R® CRISPR-Cas9 tracrRNA (IDT) or Alt-R® CRISPR-Cas9 tracrRNA, ATTO™ 550 (IDT) and desired crRNAs were mixed at 1:1 ratio in Nuclease-Free Duplex Buffer (IDT) and incubated at 95° C. for 30 s, then slowly cooled down to room temperature over 1 hour.

### Synthesis of DNA Probe for GOLD FISH

[0276] For GOLD FISH against a short target region (<10 kb), designed DNA oligonucleotides (without any labeling/modification) were purchased from IDT, and fluorescently labeled as previously described (Gaspar et al., 2017). Briefly, to conjugate an amino-ddUTP at the 3′ end of each oligonucleotide, 66.7 μM DNA oligonucleotides, 200 μM Amino-11-ddUTP (Lumiprobe) and 0.4 U/μl Terminal Deoxynucleotidyl Transferase (TdT, Thermo Scientific, EP0162) were mixed in 1×TdT Reaction buffer (Thermo Scientific) and incubated overnight at 37° C. The reaction was cleaned up by ethanol precipitations and P4 beads (Bio-Rad, #1504124) spin columns. Next, the DNA oligonucleotides conjugated with amino-ddUTP were mixed with 100 μg of Cy3-NHS or Cy5-NHS (Lumiprobe or GE Healthcare) in 0.1 M sodium bicarbonate and incubated overnight at room temperature, and cleaned up by ethanol precipitations and P4 beads (Bio-Rad, #1504124) spin columns. We generally achieved ˜90% labeling efficiency. In some cases, unlabeled oligonucleotides were removed by high-performance liquid chromatography (HPLC).

[0277] For p-arm/q-arm of ChrX ‘paint’, an oligopool of template DNA for synthesizing primary probes were purchased from Twist Bioscience, and the primary probes were synthesized as previously described (Moffitt and Zhuang, 2016). In short, the oligopool of template DNA was amplified to a dsDNA pool using Phusion® Hot Start Flex 2× Master Mix (NEB) by limit-cycle PCR (no more than 10 cycles). One of the primers we used for the limit-cycle PCR contained a T7 promoter sequence. The dsDNA pool was cleaned up by using DNA Clean & Concentrator-100 (Zymo, D4029). Next, the dsDNA pool was further amplified and converted into single-stranded RNA (ssRNA) pool using HiScribe™ T7 Quick High Yield RNA Synthesis Kit (NEB). The ssRNA pool was converted back to desired primary probe pool by using Maxima H-reverse transcriptase (Thermo Scientific, EP0753) followed by alkaline hydrolysis. The primary probe pool was further purified to remove enzyme and excess dNTPs, and we found RNA Clean & Concentrator Kits (Zymo, R1017) worked excellently for this purpose. The primers for synthesizing the primary probes and Cy3- or Cy5-labeled secondary readout probes were purchase from IDT. The sequences of primers and template DNA for synthesizing the primary probes and the crRNAs are listed in Table 2. The sequences of readout probes are also listed in Table 2.

### Cost Estimate of GOLD FISH

[0278] Here we estimate the cost of GOLD FISH targeting a non-repetitive genomic locus (a few kb long). Assume GOLD FISH will be performed in an imaging dish with 12-millimeter-diameter glass bottom surface.

[0279] Guide RNAs. Alt-R® CRISPR-Cas9 tracrRNA can be purchased from IDT, each GOLD FISH experiment consumes ˜100 pmol of tracrRNA ($0.6 to $1.9). Template DNA for in vitro transcribing crRNAs can be purchased from IDT (oPools Oligo Pools). A set of template DNA strands (which can transcribe up to 47 different crRNAs) costs $99. The crRNAs can be in a single reaction using HiScribe™ T7 Quick High Yield RNA Synthesis Kit ($5.24 per reaction).

[0280] Oligonucleotide probes. DNA oligonucleotides without any labeling or modification can be purchase from IDT in a 500 picomole DNA Plate Oligo. The plate requires at least 96 oligonucleotides to be ordered. We found ˜60 probe oligos (on average 21-nt for each probe) would be enough for GOLD FISH to achieve excellent signals. Therefore, a plate containing 60 oligonucleotide probes and 36 random oligonucleotides (15-nt each) can be purchased from IDT ($180). To label the 60 oligonucleotide probes, terminal deoxynucleotidyl transferase (ThermoFisher, EP0162), amino-11-ddUTP (Lumiprobe) and NHS-form of fluorophores were used ($6 to $32).

[0281] Cas9 and Rep-X Each GOLD FISH experiment consumes ˜100 pmol of Cas9_{dHNH}. 100 pmol of Alt-R® S.p. Cas9 H840A Nickase V3 (IDT) costs $23 to $32. If Cas9_{dHNH} is produced in the lab, the cost on Cas9 per experiment can be substantially lower. We produced 200 nmol of Rep-X using reagents of less than $300, while each GOLD FISH experiment consumes only 45 pmol of Rep-X. Therefore, once Rep-X is produced in the lab, the cost on Rep-X per experiment can be very low.

### Fixation of Cultured Cell and Tissue Section

[0282] We adopted two different fixation methods for GOLD FISH: methanol-acetic acid (MAA) fixation and Buffered Ethanol (BE70)-based fixation (BE70-MAA). Both methods permeabilized cells during the fixation steps.

[0283] For GOLD FISH against MUC4-R and MUC4-NR, MAA fixation was used (except FIG. 10D). Cells were briefly washed once with PBS and fixed at −20° C. for 20 min in pre-chilled MAA solution (methanol and acetic acid mixed at 1:1 ratio), then washed three times (5 min each wash at room temperature unless indicated) with PBS.

[0284] For GOLD FISH against other genomic regions, BE70-MAA fixation was used. This fixation method has two steps: BE70 fixation and MAA treatment. The BE70 buffer were prepared as previously described (Perry et al., 2016). To make 50 ml of BE70 buffer, 2.5 ml of 10×PBS (pH 7.4) was mixed with 1 ml of 50% glycerol and 0.25 ml of glacial acetic acid. The mixture was adjusted to pH 4.3 by adding NaOH. The solution was then filled to 15 ml with distilled water and mixed with 35 ml of absolute (200 proof) EtOH. Cells were briefly washed once with PBS and fixed at room temperature for 25 min in BE70 buffer, then washed twice with PBS. Cells were then incubated at −20° C. for 20 min in pre-chilled MAA solution and washed three times with PBS. We found the incubation in MAA solution was necessary for efficient GOLD FISH labeling in the BE70-fixed cells, presumably because MAA solution further permeabilized the cells.

[0285] For the PFA-fixed cells (FIG. 10D), cells were fixed with 4% paraformaldehyde (PFA) in PBS at room temperature for 10 min. The cells were washed three times with PBS and incubated in freshly made 1 mg/ml sodium borohydride for 10 min at room temperature. The cells were washed twice with PBS, and further permeabilized with 0.5% (v/v) Triton X-100 in PBS for 10 min at room temperature. The cells were washed twice with PBS and incubated with 0.1 M HCl for 5 min at room temperature. Finally, the cells were washed three times with PBS.

[0286] For CASFISH, cells were fixed as previously described (Deng et al., 2015). Cells were fixed at −20° C. for 20 min in pre-chilled MAA solution, then washed three times with PBS.

### GOLD FISH

[0287] In this work, GOLD FISH was performed against different genomic sequences (e.g. repetitive, non-repetitive, and chromosome ‘paint’), and the GOLD FISH protocol has evolved with the development of the method. Therefore, individual GOLD FISH experiments were performed with different parameters (e.g. Cas9 RNP and oligo probe concentrations). To avoid confusions, here we describe a standard GOLD FISH protocol. Detailed protocols of each GOLD FISH experiment presented in this work can be found in Methods S1.

### Step 1: Targeted Chromatin Denaturation.

[0288] After the cell fixation, Cas9 RNP (20 nM to 40 nM per guide RNA species, e.g. the MUC4-NR guide-RNA set 1 contains 9 different guide RNAs, then the total concentration of guide RNA in this step would be 180 to 360 nM) was assembled by mixing equal amount of Cas9_{dHNH} and guide RNA in Binding-Blocking buffer (20 mM Hepes pH 7.5, 100 mM KCl, 5 mM MgCl₂, 5% (v/v) glycerol and 0.1% (v/v) TWEEN-20, 1% (w/v) BSA, freshly added 1 mM DTT, freshly added 0.1 mg/ml E. coli tRNA) and incubated for 10 min at room temperature. The cells were incubated in Binding-Blocking buffer for 10 min at 37° C., and the Cas9 RNP was added to the cells and incubated for 30 to 60 min at 37° C. After the incubation, free Cas9 RNP were removed. Rep-X (100 to 400 nM) in Binding-Blocking buffer supplied with 2 mM ATP were added to the cells and incubated at 37° C. for 30 min. The cells were washed three times (5 min each wash at room temperature) with PBS.

### Step 2: RNAse Digestion (Optional).

[0289] RNase Cocktail™ Enzyme Mix (Invitrogen, AM2286) was diluted 100 times in PBS and incubated with the cells for 1 hour at 37° C. The cells were washed three times (5 min each wash at room temperature) with PBS.

### Step 3: FISH Probe Hybridization.

[0290] The cells were incubated in freshly made hybridization buffer (10% to 20% (v/v) formamide, 2× saline-sodium citrate (SSC), 0.1 mg/ml E. coli tRNA, 10% (w/v) dextran sulfate, 2 mg/ml BSA) for 10 min at 37° C. Next, fluorescently labeled oligonucleotide probes (2.5 nM per probe, e.g. the MUC4-NR probe set contains 57 different oligonucleotide probes, then the total concentration of probes in this step should be 142.5 nM) in the hybridization buffer were applied to the cells and incubated for 1 hour at room temperature (repetitive targets) or 37° C. (non-repetitive targets). The cells were washed twice (15 min each wash) with wash buffer (20% formamide, 2×SSC) at 37° C. and once with PBS at room temperature for 5 min.

### Step 4: Preparation for Imaging.

[0291] (Optional) one drop of Hoechst 33342 Ready Flow™ Reagent (Invitrogen, R37165) was mixed with 2 ml of PBS and incubated with the cells for 2 min at room temperature. Finally, FISH-imaging buffer (20 mM Tris-HCl pH 7.5, 100 mM KCl, 5 mM MgCl₂, 5% (vol/vol) glycerol, 0.2 mg/ml BSA and saturated Trolox (>5 mM), 0.8% (w/v) dextrose) supplied with GLOXY (1 mg/ml glucose oxidase, 0.04 mg/ml catalase) was added to the cells for imaging.

### CASFISH

[0292] CASFISH experiments were performed as previously described (Deng et al., 2015). The fixed cells were incubated with CASFISH-blocking/reaction buffer (20 mM Hepes pH 7.5, 100 mM KCl, 5 mM MgCl₂, 5% (v/v) glycerol and 0.1% (v/v) TWEEN-20, 1% (w/v) BSA, freshly added 1 mM DTT) at 37° C. for 15 min. Five nM Cas9_{dHNH} or dCas9 was mixed with 5 nM ATTO550-labeled guide RNA and incubated in the CASFISH-blocking/reaction buffer for 10 min at room temperature, and stored on ice before next step. The assembled Cas9 RNP was applied to the cells and incubated at 37° C. for 30 min. After the incubation, the cells were washed three times with CASFISH-blocking/reaction buffer (5 min each at room temperature).

### Microscopy and Data Acquisition for GOLD FISH

[0293] Epifluorescence microscopy was performed on Nikon Eclipse Ti2 microscope with Nikon Plan Apo X 60× Oil objective and Intermediate Magnification switching of 1.0×/1.5×. The system was driven by NIS-Elements AR software. Illumination was provided by high power LED. Emission was collected using filter sets: ET—Sedat Quad (Chroma, 89100) for Hoechst 33342 channel, ET—Gold FISH (Chroma, 49304) for Cy3 or ATTO550 channel, ET—Cy5 Narrow Excitation (Chroma, 49009) for Cy5 channel, and ET—Cy7 (Chroma, 49007) for Alexa750 channel. Images were recorded as z-stacks (21 to 35 steps), with 200 nm or 300 nm step size using a digital CMOS camera (ORCA-Flash 4.0 C11440, Hamamatsu), except for several images which were recorded using an EMCCD camera (Andor iXon 888) (FIGS. 3F, 8D and 8E). TetraSpeck™ Microspheres (T7279, Invitrogen) were also imaged in the same way for correction of chromatic aberration between Cy3/ATTO550 channel and Cy5 channel.

Comparison of Live and after-GOLD FISH Cells

[0294] DNA in live IMR-90 cells was stained with Hoechst 33342 Ready Flow™ Reagent (Invitrogen, R37165) and imaged at the focus plane where the nuclear edges were the sharpest. The coordinates of imaged cells were recorded so that the same cells could be found again after GOLD FISH protocol. Next, some cells (FIG. 8A, top) were fixed using the BE70-based fixation method (i.e. BE70 fixation followed by MAA treatment). Other cells (FIG. 8A, bottom) were fixed using the MAA fixation method. Next, the protocol of GOLD FISH against TAD5 and TAD37 was performed on all cells. After the GOLD FISH, the previously imaged cells were found, and their nuclei were imaged again at the focus plane where the nucleus edges were sharpest. The images of nuclei before and after GOLD FISH were split into sub-images, and each sub-image contained only one nucleus. The area of nucleus in each sub-image were automatically measured using the ‘Threshold’ function with ‘IsoDATA’ parameter in Fiji/ImageJ (Schneider et al., 2012). For each cell, the ratio of nuclear area after GOLD FISH (Area_{GOLDFISH}) to nuclear area when the cell was alive (AreaLive) was calculated (FIG. 8B).

Data analysis for GOLD FISH

[0295] Generate representative images shown in FIGS. Images were processed using Fiji/ImageJ. Z-stack images were projected to a single plane using the ‘Max Intensity’ Z-Projection function. The contrasts of images were linearly adjusted by changing the minimum and maximum values using the ‘brightness/contrast’ function in Image J for optimal visualization purpose only. The correction of chromatic aberration between Cy3/ATTO550 channel and Cy5 channel was performed using the TetraSpeck™ Microspheres images with custom-written MATLAB scripts.

[0296] Foci fitting and signal-to-background measurement. FISH-quant was used to find foci in each cell and fitted with three-dimensional (3D) Gaussian function (Mueller et al., 2013). Spatial coordinates (x, y and z), amplitude (A_{signal}) and background (BGD_{FISH-quant}) were extracted from the 3D Gaussian fitting. The average background (BGD_{coverslip}) was calculated from multiple areas where there was no cell. To calculate signal-to-background ratio (S/B), we used

$$S / B = \frac{{A}_{signal}}{{BGD}_{FISH - quant} - {BGD}_{coverslip}}$$

TAD5 and TAD37 distance measurement. After the chromatic aberration correction, the distance between TAD5 and TAD37 was measured:

$$Distance = \sqrt{{( {x}_{TAD 5} - {x}_{TAD 37} )}^{2} + {( {y}_{TAD 5} - {y}_{TAD 37} )}^{2} + {( {z}_{TAD 5} - {z}_{TAD 37} )}^{2}}$$

Center of Mass distance and volume measurement. The Z-stack images of ChrX ‘paint’ were background-subtracted using the ‘Subtract background’ function in Fiji/ImageJ with rolling ball radius of 15 pixels. After the chromatic aberration correction between Cy3 channel and Cy5 channel, each ChrX was cropped into a small region manually. The mean and standard deviation of residual nuclear background (BGDₘₑₐₙ and BGD_{STDEV}) were measured. A threshold (T) was set at:

$$T = {BGD}_{mean} + 1.5 * {BGD}_{STDEV}$$

The pixels within the cropped region with intensities higher than T were selected. The center of mass coordinate ( [symbol] ) of p-arm or q-arm of ChrX was calculated using the coordinates [symbol] of each selected pixel and intensity I of each selected pixel as weighting factors:

$$\vec{CoM} = \frac{{Σ}_{{I}_{i} > T} ( {\vec{x}}_{i} * {I}_{i} )}{{Σ}_{{I}_{i} > T} {\vec{x}}_{i}}$$

The CoM distances between p-arm and q-arm of each ChrX were calculated:

$$Distance = \sqrt{{( \vec{{CoM}_{p - arm}} - \vec{{CoM}_{q - arm}} )}^{2}}$$

The volumes of each ChrX were calculated:

$$Volume = Number of selected pixels * pixel size$$

### Quantification and Statistical Analysis

[0297] FISH foci were fitted with three-dimensional Gaussian functions using FISH-quant to obtain foci number per cell, foci intensity and background (Mueller et al., 2013). The nuclear area of each cell was automatically measured using the ‘Threshold’ function with ‘IsoDATA’ parameter in Fiji/ImageJ (Schneider et al., 2012). Two or more cells with overlapping nuclei were excluded from quantifications. Statistical analyses were conducted using Student's t-test. n represents number of cells (except for FIG. 1E, where n represents number of imaging view measured). Standard deviation (SD) are shown in this work. OriginPro 2020 was used for the statistical analysis. Statistical details of experiments such as values of n can be found in the FIG. legends.

### Example 2: Methods—Detailed Protocols of GOLD FISH Experiments

[0298] GOLD FISH against MUC4 repetitive region (MUC4-R). 200 nM Cas9_{dHNH} (i.e. Cas9 (H840A)) and 200 nM guide RNA were mixed in Binding-Blocking buffer (20 mM HEPES pH 7.5, 100 mM KCl, 5 mM MgCl₂, 5% (v/v) glycerol and 0.1% (v/v) TWEEN-20, 1% (w/v) BSA, freshly added 1 mM DTT, freshly added 0.1 mg/ml E. coli tRNA) for 10 min at room temperature, then diluted to 20 nM Cas9 RNP in Binding-Blocking buffer before use. The cells were incubated in Binding-Blocking buffer for 10 min at 37° C., and the 20 nM Cas9 RNP was added to the cells and incubated for 30 min at 37° C. After the incubation, free Cas9 RNP were removed. 100 nM Rep-X in Binding-Blocking buffer supplied with 2 mM ATP were added to the cells and incubated at 37° C. for 30 min. The cells were washed three times (5 min each wash at room temperature) with PBS. And RNase Cocktail™ Enzyme Mix (Invitrogen, AM2286) were diluted 100 times in PBS and incubated with the cells for 1 hour at 37° C. The cells were washed three times (5 min each wash at room temperature) with PBS, and incubated in freshly made hybridization buffer (10% (v/v) formamide, 2× saline-sodium citrate (SSC), 0.1 mg/ml E. coli tRNA, 10% (w/v) dextran sulfate, 2 mg/ml BSA) for 10 min at room temperature. Next, 2.5 nM Cy5-labeled MUC4 repetitive region probe in the hybridization buffer were applied to the cells and incubated for 1 hour at room temperature in the dark. After hybridization, the cells were washed twice (15 min each wash) with wash buffer (20% formamide, 2×SSC) at 37° C., and once with PBS at room temperature for 5 min. One drop of Hoechst 33342 Ready Flow™ Reagent (Invitrogen, R37165) was mixed with 2 ml of PBS, and incubated with the cells for 2 min at room temperature. Finally, FISH-imaging buffer (20 mM Tris-HCl pH 7.5, 100 mM KCl, 5 mM MgCl₂, 5% (vol/vol) glycerol, 0.2 mg/ml BSA and saturated Trolox (>5 mM), 0.8% (w/v) dextrose) supplied with GLOXY was added to the cells for imaging.

[0299] GOLD FISH against MUC4-R using ATTO550 labeled guide RNA. The protocol of GOLD FISH against MUC4 repetitive region (MUC4-R) was used with the following modifications: ATTO550-labeled guide RNA was used; Five nM Cas9_{dHNH} RNP was added to the cells; The RNAse treatment step was omitted because the ATTO550 was labeled at the 5′ end of tracrRNA. RNAse might partially digest the tracrRNA and release ATTO550 from the tracrRNA; Cas9 wash buffer (20 mM Tris-HCl pH 8, 100 mM KCl, 5 mM MgCl₂, 5% (vol/vol) glycerol) was used instead of PBS; Hybridization buffer was supplied with 200 nM poly dT single-stranded DNA for further blocking non-specific single-stranded DNA binding sites in the cells; During the formamide wash steps, the cells were washed with (10% formamide, 2×SSC) at RT for 15 min, and washed again with (20% formamide, 2×SSC) at 37° C. for 10 min.

[0300] GOLD FISH against MUC4-R using ATTO550 labeled guide RNA in the absence of Cas9 (i.e. no Cas9 control, FIG. 6E). The protocol of GOLD FISH against MUC4 repetitive region (MUC4-R) using ATTO550 labeled guide RNA was used with the following modification: only 5 nM ATTO550-labeled guide RNA was added to the cells, Cas9_{dHNH} was omitted.

[0301] GOLD FISH against MUC4 non-repetitive region (MUC4-NR) using the MUC4-NR guide-RNA set 1. The commercial Alt-R® S.p. Cas9 H840A Nickase V3 (IDT) was used. 1.8 μM the Cas9 nickase variant and 1.8 μM guide RNAs were mixed in Binding-Blocking buffer for 10 min at room temperature, then diluted to 360 nM Cas9 RNP in Binding-Blocking buffer before use. The cells were incubated in Binding-Blocking buffer for 10 min at 37° C., and the 360 nM Cas9 RNP was added to the cells and incubated for 30 min at 37° C. After the incubation, free Cas9 RNP were removed. 300 nM Rep-X in Binding-Blocking buffer supplied with 2 mM ATP were added to the cells and incubated at 37° C. for 1 hour. The cells were washed three times (5 min each wash at room temperature) with PBS. And RNase Cocktail™ Enzyme Mix were diluted 100 times in PBS and incubated with the cells for 1 hour at 37° C. The cells were washed three times (5 min each wash at room temperature) with PBS, and incubated in freshly made hybridization buffer (20% (v/v) formamide, 2×SSC, 0.1 mg/ml E. coli tRNA, 10% (w/v) dextran sulfate, 2 mg/ml BSA, 200 nM poly dT single-stranded DNA) for 10 min at 37° C. Next, 142.5 nM Cy5-labeled MUC4 non-repetitive region probes in the hybridization buffer were applied to the cells and incubated for 1 hour at 37° C. in the dark. The cells were washed twice (15 min each wash) with wash buffer (20% formamide, 2×SSC) at 37° C., and once with PBS at room temperature for 5 min. One drop of Hoechst 33342 Ready Flow™ Reagent (Invitrogen) was mixed with 2 ml of PBS and incubated with the cells for 2 min at room temperature. Finally, the FISH-imaging buffer supplied with GLOXY was added to the cells for imaging.

[0302] GOLD FISH against MUC4-NR using the MUC4-NR guide-RNA set 2 (FIG. 3D-E). The protocol of GOLD FISH against MUC4 non-repetitive region (MUC4-NR) was used with the following modifications: 2.2 μM the Cas9 nickase variant and 2.2 μM guide RNAs were mixed in Binding-Blocking buffer for 10 min at room temperature, then diluted to 440 nM Cas9 RNP in Binding-Blocking buffer before use.

[0303] GOLD FISH against MUC4-NR using the MUC4-I1 guide RNA (FIG. 3F-G). The protocol of GOLD FISH against MUC4 non-repetitive region (MUC4-NR) was used with the following modifications: 250 nM the Cas9 nickase variant and 250 nM guide RNAs were mixed in Binding-Blocking buffer for 10 min at room temperature, then diluted to 40 nM Cas9 RNP in Binding-Blocking buffer before use.

[0304] GOLD FISH against MUC4-NR and MUC4-R (FIG. 3A). The protocol of GOLD FISH against MUC4 non-repetitive region (MUC4-NR) using the MUC4-NR guide-RNA set 1 was used with the following modifications: the 360 nM Cas9 RNP against MUC4-NR was supplied with 20 nM Cas9 RNP against MUC4-R; After the MUC4-NR probe hybridization and formamide wash steps, a 2^{nd} round of probe hybridization was performed: 2.5 nM Cy3-labeled MUC4 repetitive region probe in the hybridization buffer (10% (v/v) formamide, 2×SSC, 0.1 mg/ml E. coli tRNA, 10% (w/v) dextran sulfate, 2 mg/ml BSA) were applied to the cells and incubated for 1 hour at room temperature; the formamide wash steps were performed again after the 2^{nd} round hybridization.

[0305] GOLD FISH against MUC4-NR using the MUC4-NR guide-RNA set 1 in PFA-fixed cells (FIG. 10D). The protocol of GOLD FISH against MUC4 non-repetitive region (MUC4-NR) was used with the following modification: Cas9 RNP and Rep-X were added to the cells together in Binding-Blocking buffer supplied with 5 mM ATP and additional 5 mM MgCl₂, and incubated at 37° C. overnight. The higher ATP and MgCl₂ concentrations were used to support Rep-X's unwinding activity for a longer time.

[0306] GOLD FISH against TAD5 and TAD37. 2.3p M Cas9_{dHNH} nickase (H840A) and 1.15p M unlabeled guide RNAs against TAD5 were mixed in Binding-Blocking buffer supplied with another 5 mM MgCl₂ for 10 min at room temperature. 3.24 μM Cas9_{dHNH} nickase (H840A) and 1.62 μM unlabeled guide RNAs against TAD37 were mixed in Binding-Blocking buffer supplied with another 5 mM MgCl₂ for 10 min at room temperature. The cells were incubated in Binding-Blocking buffer for 10 min at 37° C. Next, 540 nM Cas9 RNP against TAD5 and 760 nM Cas9 RNP against TAD37 were mixed with 200 nM Rep-X and 4 mM ATP, and incubated with the cells at room temperature overnight. After the incubation, free Cas9 RNP were removed. The cells were again incubated with 200 nM Rep-X in Binding-Blocking buffer supplied with 2 mM ATP at 37° C. for 1 hour. The cells were washed three times (5 min each wash at room temperature) with PBS. And RNase Cocktail™ Enzyme Mix were diluted 100 times in PBS and incubated with the cells for 1 hour at 37° C. The cells were washed three times (5 min each wash at room temperature) with PBS, and incubated in freshly made hybridization buffer (20% (v/v) formamide, 2×SSC, 0.1 mg/ml E. coli tRNA, 10% (w/v) dextran sulfate, 2 mg/ml BSA) for 10 min at 37° C. Next, 166 nM Cy5-labeled TAD5 probes and 160 nM Cy3-labeled TAD37 probes in the hybridization buffer were applied to the cells and incubated for 1 hour at 37° C. in the dark. The cells were washed twice (15 min each wash) with wash buffer (20% formamide, 2×SSC) at 37° C., and once with PBS at room temperature for 5 min. For co-immunostaining of marcroH2A.1, the cells were incubated in IF-buffer (3% (w/v) BSA in PBS) for 20 min at room temperature. 250× diluted primary antibody (anti-marcroH2A.1, Abcam, ab183041) in IF-buffer was applied to the cells and incubated for 1 hour at room temperature, washed three times with PBS, incubated with 500× diluted secondary antibody (Goat anti-Rabbit Alexa Flour 750, Invitrogen, A21039) for 1 hour at room temperature, and washed three times with PBS. Finally, the FISH-imaging buffer supplied with GLOXY was added to cells for imaging.

[0307] GOLD FISH against p-arm and q-arm of ChrX. 2 μM Cas9_{dHNH} nickase (H840A) and 2 μM guide RNAs for ChrX ‘paint’ were mixed in Binding-Blocking buffer for 10 min at room temperature. The cells were incubated in Binding-Blocking buffer for 10 min at 37° C., and the 2 μM Cas9 RNP was added to the cells and incubated for 1 hour at 37° C. After the incubation, free Cas9 RNP were removed. 300 nM Rep-X in Binding-Blocking buffer supplied with 2 mM ATP were added to the cells and incubated at 37° C. for 1 hour. The cells were washed three times (5 min each wash at room temperature) with PBS. And RNase Cocktail™ Enzyme Mix were diluted 100 times in PBS and incubated with the cells for 1 hour at 37° C. The cells were washed three times (5 min each wash at room temperature) with PBS, and incubated in freshly made hybridization buffer (20% (v/v) formamide, 2× saline-sodium citrate (SSC), 0.1 mg/ml E. coli tRNA, 10% (w/v) dextran sulfate, 2 mg/ml BSA) for 10 min at 37° C. Next, 1.2 μM primary probes for ChrX ‘paint’ in the hybridization buffer were applied to the cells and incubated overnight at 37° C. in the dark. The cells were washed twice (15 min each wash) with wash buffer (20% formamide, 2×SSC) at 37° C., and incubated in freshly made hybridization buffer (10% (v/v) formamide, 2×SSC, 0.1 mg/ml E. coli tRNA, 10% (w/v) dextran sulfate, 2 mg/ml BSA) for 10 min at 37° C. Next, 10 nM Cy5-labeled readout probe for q-arm of ChrX and 10 nM Cy3-labeled readout probe for p-arm of ChrX in the hybridization buffer were applied to the cells and incubated for 1 hour at 37° C. in the dark. The cells were washed twice (15 min each wash) with wash buffer (30% formamide, 2×SSC) at 37° C., and once with PBS at room temperature for 5 min. The co-immunostaining of marcroH2A.1 was performed as described above. The FISH-imaging buffer supplied with GLOXY was added to cells for imaging.

[0308] GOLD FISH against HER2 and RARA on 10 μm tissue sections. 1.875 M Cas9_{dHNH} nickase (H840A) and 1.36 μM unlabeled guide RNAs against RARA were mixed in Binding-Blocking buffer supplied with additional 5 mM MgCl₂ for 10 min at room temperature. 1.875 μM Cas9_{dHNH} nickase (H840A) and 1.32 μM unlabeled guide RNAs against HER2 were mixed in Binding-Blocking buffer supplied with additional 5 mM MgCl₂ for 10 min at room temperature. The cells were incubated in Binding-Blocking buffer for 10 min at 37° C. 1.36 μM Cas9 RNP against RARA and 1.32 μM Cas9 RNP against HER2 were mixed at 1:1 ratio and incubated with the cells at 37° C. for 1 hour. Next, 1.36 μM Cas9 RNP against RARA and 1.32 μM Cas9 RNP against HER2 were mixed with 400 nM Rep-X and 4 mM ATP, and incubated with the cells at 37° C. for 1 hour. The cells were washed three times (5 min each wash at room temperature) with PBS. And RNase Cocktail™ Enzyme Mix were diluted 100 times in PBS and incubated with the cells for 1 hour at 37° C. The cells were washed three times (5 min each wash at room temperature) with PBS, and incubated in freshly made hybridization buffer (10% (v/v) formamide, 2×SSC, 0.1 mg/ml E. coli tRNA, 10% (w/v) dextran sulfate, 2 mg/ml BSA) for 10 min at 37° C. Next, 208 nM Cy5-labeled HER2 probes and 195 nM Cy3-labeled RARA probes in the hybridization buffer were applied to the cells and incubated overnight at 37° C. in the dark. The cells were washed twice (15 min each wash) with wash buffer (30% formamide, 2×SSC) at 37° C., and once with PBS at room temperature for 5 min. For co-immunostaining of HER2, the cells were incubated in IF-buffer for 20 min at room temperature. 200× diluted primary antibody (anti-HER2 erbb2, Cell Signaling Technology, 2165S) in IF-buffer was applied to the cells and incubated for 1 hour at room temperature, washed three times with PBS, incubated with 500× diluted secondary antibody (Goat anti-Rabbit Alexa Flour 750, Invitrogen, A21039) for 1 hour at room temperature, and washed three times with PBS. One drop of Hoechst 33342 Ready Flow™ Reagent was mixed with 2 ml of PBS, and incubated with the cells for 2 min at room temperature. Finally, the FISH-imaging buffer supplied with GLOXY was added to the cells for imaging.

[0309] GOLD FISH against HER2 and CEP17 on 10 μm tissue sections. The protocol of GOLD FISH against HER2 and RARA on 10 μm tissue sections was used with the following modifications: 40 nM Cas9 RNP against CEP17 instead of 1.36 μM Cas9 RNP against RARA was used; 2.5 nM Cy3-labeled CEP17 probe was used instead of 195 nM Cy3-labeled RARA probes.

### REFERENCES

[0310] Anders, C., Niewoehner, O., Duerst, A., and Jinek, M. (2014). Structural basis of PAM-dependent target DNA recognition by the Cas9 endonuclease. Nature 513, 569-573.
[0311] Arslan, S., Khafizov, R., Thomas, C. D., Chemla, Y. R., and Ha, T. (2015). Engineering of a superhelicase through conformational control. Science 348, 344.
[0312] Beliveau, B. J., Joyce, E. F., Apostolopoulos, N., Yilmaz, F., Fonseka, C. Y., McCole, R. B., Chang, Y., Li, J. B., Senaratne, T. N., Williams, B. R., et al. (2012). Versatile design and synthesis platform for visualizing genomes with Oligopaint FISH probes. Proceedings of the National Academy of Sciences of the United States of America 109, 21301-21306.
[0313] Beliveau, B. J., Kishi, J. Y., Nir, G., Sasaki, H. M., Saka, S. K., Nguyen, S. C., Wu, C. T., and Yin, P. (2018). OligoMiner provides a rapid, flexible environment for the design of genome-scale oligonucleotide in situ hybridization probes. Proceedings of the National Academy of Sciences of the United States of America 115, E2183-E2192.
[0314] Boettiger, A. N., Bintu, B., Moffitt, J. R., Wang, S., Beliveau, B. J., Fudenberg, G., Imakaev, M., Mirny, L. A., Wu, C. T., and Zhuang, X. (2016). Super-resolution imaging reveals distinct chromatin folding for different epigenetic states. Nature 529, 418-422.
[0315] Brown, J. M., Roberts, N. A., Graham, B., Waithe, D., Lagerholm, C., Telenius, J. M., De Ornellas, S., Oudelaar, A. M., Scott, C., Szczerbal, I., et al. (2018). A tissue-specific self-interacting chromatin domain forms independently of enhancer-promoter interactions. Nat Commun 9, 3849.
[0316] Chen, B., Gilbert, L. A., Cimini, B. A., Schnitzbauer, J., Zhang, W., Li, G. W., Park, J., Blackburn, E. H., Weissman, J. S., Qi, L. S., et al. (2013). Dynamic imaging of genomic loci in living human cells by an optimized CRISPR/Cas system. Cell 155, 1479-1491.
[0317] Chen, B., Hu, J., Almeida, R., Liu, H., Balakrishnan, S., Covill-Cooke, C., Lim, W. A., and Huang, B. (2016a). Expanding the CRISPR imaging toolset with Staphylococcus aureus Cas9 for simultaneous imaging of multiple genomic loci. Nucleic acids research 44, e75.
[0318] Chen, K. H., Boettiger, A. N., Moffitt, J. R., Wang, S., and Zhuang, X. (2015). Spatially resolved, highly multiplexed RNA profiling in single cells. Science 348, aaa6090.
[0319] Chen, X., Rinsma, M., Janssen, J. M., Liu, J., Maggio, I., and Goncalves, M. A. (2016b). Probing the impact of chromatin conformation on genome editing tools. Nucleic acids research 44, 6482-6492.
[0320] Cheng, W., Hsieh, J., Brendza, K. M., and Lohman, T. M. (2001). E. coli Rep oligomers are required to initiate DNA unwinding in vitro11 Edited by D. Draper. Journal of Molecular Biology 310, 327-350.
[0321] Comstock, M. J., Whitley, K. D., Jia, H., Sokoloski, J., Lohman, T. M., Ha, T., and Chemla, Y. R. (2015). Direct observation of structure-function relationship in a nucleic acid-processing enzyme. Science 348, 352.
[0322] Cong, L., Ran, F. A., Cox, D., Lin, S., Barretto, R., Habib, N., Hsu, P. D., Wu, X., Jiang, W., Marraffini, L. A., et al. (2013). Multiplex Genome Engineering Using CRISPR/Cas Systems. Science 339, 819.
[0323] Costanzi, C., and Pehrson, J. R. (1998). Histone macroH2A1 is concentrated in the inactive X chromosome of female mammals. Nature 393, 599-601.
[0324] Cui, Y., Xu, J., Cheng, M., Liao, X., and Peng, S. (2018). Review of CRISPR/Cas9 sgRNA Design Tools. Interdiscip Sci 10, 455-465.
[0325] Dagdas, Y. S., Chen, J. S., Sternberg, S. H., Doudna, J. A., and Yildiz, A. (2017). A conformational checkpoint between DNA binding and cleavage by CRISPR-Cas9. Science Advances 3, eaao0027.
[0326] Deng, W., Shi, X., Tjian, R., Lionnet, T., and Singer, R. H. (2015). CASFISH: CRISPR/Cas9-mediated in situ labeling of genomic loci in fixed cells. Proceedings of the National Academy of Sciences of the United States of America 112, 11870-11875.
[0327] Dixon, J. R., Selvaraj, S., Yue, F., Kim, A., Li, Y., Shen, Y., Hu, M., Liu, J. S., and Ren, B. (2012). Topological domains in mammalian genomes identified by analysis of chromatin interactions. Nature 485, 376-380.
[0328] Doudna, J. A., and Charpentier, E. (2014). The new frontier of genome engineering with CRISPR-Cas9. Science 346, 1258096.
[0329] Furrer, D., Sanschagrin, F., Jacob, S., and Diorio, C. (2015). Advantages and disadvantages of technologies for HER2 testing in breast cancer specimens. Am J Clin Pathol 144, 686-703.
[0330] Gasiunas, G., Barrangou, R., Horvath, P., and Siksnys, V. (2012). Cas9-crRNA ribonucleoprotein complex mediates specific DNA cleavage for adaptive immunity in bacteria. Proceedings of the National Academy of Sciences of the United States of America 109, E2579-2586.
[0331] Gaspar, I., Wippich, F., and Ephrussi, A. (2017). Enzymatic production of single molecule FISH and RNA capture probes. RNA.
[0332] Gelali, E., Girelli, G., Matsumoto, M., Wernersson, E., Custodio, J., Mota, A., Schweitzer, M., Ferenc, K., Li, X., Mirzazadeh, R., et al. (2019). iFISH is a publically available resource enabling versatile DNA FISH to study genome architecture. Nat Commun 10, 1636.
[0333] Gilbert, Luke A., Larson, Matthew H., Morsut, L., Liu, Z., Brar, Gloria A., Torres, Sandra E., Stern-Ginossar, N., Brandman, O., Whitehead, Evan H., Doudna, Jennifer A., et al. (2013). CRISPR-Mediated Modular RNA-Guided Regulation of Transcription in Eukaryotes. Cell 154, 442-451.
[0334] Hong, Y., Lu, G., Duan, J., Liu, W., and Zhang, Y. (2018). Comparison and optimization of CRISPR/dCas9/gRNA genome-labeling systems for live cell imaging. Genome Biol 19, 39.
[0335] Horlbeck, M. A., Witkowsky, L. B., Guglielmi, B., Replogle, J. M., Gilbert, L. A., Villalta, J. E., Torigoe, S. E., Tjian, R., and Weissman, J. S. (2016). Nucleosomes impede Cas9 access to DNA in vivo and in vitro. Elife 5.
[0336] Hua, B., Panja, S., Wang, Y., Woodson, S. A., and Ha, T. (2018). Mimicking Co-Transcriptional RNA Folding Using a Superhelicase. J Am Chem Soc 140, 10067-10070.
[0337] Huai, C., Li, G., Yao, R., Zhang, Y., Cao, M., Kong, L., Jia, C., Yuan, H., Chen, H., Lu, D., et al. (2017). Structural insights into DNA cleavage activation of CRISPR-Cas9 system. Nature Communications 8.
[0338] Jiang, F., Taylor, D. W., Chen, J. S., Kornfeld, J. E., Zhou, K., Thompson, A. J., Nogales, E., and Doudna, J. A. (2016). Structures of a CRISPR-Cas9 R-loop complex primed for DNA cleavage. Science 351, 867.
[0339] Jinek, M., Chylinski, K., Fonfara, I., Hauer, M., Doudna, J. A., and Charpentier, E. (2012). A Programmable Dual-RNA-Guided DNA Endonuclease in Adaptive Bacterial Immunity. Science 337, 816.
[0340] Knight Spencer, C., Tjian, R., and Doudna Jennifer, A. (2017). Genomes in Focus: Development and Applications of CRISPR-Cas9 Imaging Technologies. Angewandte Chemie International Edition 57, 4329-4337.
[0341] Kocak, D. D., Josephs, E. A., Bhandarkar, V., Adkar, S. S., Kwon, J. B., and Gersbach, C. A. (2019). Increasing the specificity of CRISPR systems with engineered RNA secondary structures. Nature biotechnology.
[0342] Korolev, S., Hsieh, J., Gauss, G. H., Lohman, T. M., and Waksman, G. (1997). Major Domain Swiveling Revealed by the Crystal Structures of Complexes of E. coli Rep Helicase Bound to Single-Stranded DNA and ADP. Cell 90, 635-647.
[0343] Lakadamyali, M., and Cosma, M. P. (2020). Visualizing the genome in high resolution challenges our textbook understanding. Nature methods.
[0344] Lee, K. S., Balci, H., Jia, H., Lohman, T. M., and Ha, T. (2013). Direct imaging of single UvrD helicase dynamics on long single-stranded DNA. Nat Commun 4, 1878.
[0345] Levsky, J. M., and Singer, R. H. (2003). Fluorescence in situ hybridization: past, present and future. Journal of cell science 116, 2833-2838.
[0346] Ma, H., Tu, L. C., Naseri, A., Chung, Y. C., Grunwald, D., Zhang, S., and Pederson, T. (2018). CRISPR-Sirius: RNA scaffolds for signal amplification in genome imaging. Nature methods 15, 928-931.
[0347] Maeder, M. L., Linder, S. J., Cascio, V. M., Fu, Y., Ho, Q. H., and Joung, J. K. (2013). CRISPR RNA-guided activation of endogenous human genes. Nature methods 10, 977-979.
[0348] Mali, P., Aach, J., Stranges, P. B., Esvelt, K. M., Moosburner, M., Kosuri, S., Yang, L., and Church, G. M. (2013a). CAS9 transcriptional activators for target specificity screening and paired nickases for cooperative genome engineering. Nature biotechnology 31, 833-838.
[0349] Mali, P., Yang, L., Esvelt, K. M., Aach, J., Guell, M., DiCarlo, J. E., Norville, J. E., and Church, G. M. (2013b). RNA-Guided Human Genome Engineering via Cas9. Science 339, 823.
[0350] Mao, S., Ying, Y., Wu, X., Krueger, C. J., and Chen, A. K. (2019). CRISPR/dual-FRET molecular beacon for sensitive live-cell imaging of non-repetitive genomic loci. Nucleic acids research 47, e131.
[0351] Mateo, L. J., Murphy, S. E., Hafner, A., Cinquini, I. S., Walker, C. A., and Boettiger, A. N. (2019). Visualizing DNA folding and RNA in embryos at single-cell resolution. Nature 568, 49-54.
[0352] Moffitt, J. R., and Zhuang, X. (2016). RNA Imaging with Multiplexed Error-Robust Fluorescence In Situ Hybridization (MERFISH). Methods Enzymol 572, 1-49.
[0353] Mueller, F., Senecal, A., Tantale, K., Marie-Nelly, H., Ly, N., Collin, O., Basyuk, E., Bertrand, E., Darzacq, X., and Zimmer, C. (2013). FISH-quant: automatic counting of transcripts in 3D FISH images. Nature methods 10, 277-278.
[0354] Neguembor, M. V., Sebastian-Perez, R., Aulicino, F., Gomez-Garcia, P. A., Cosma, M. P., and Lakadamyali, M. (2018). (Po)STAC (Polycistronic SunTAg modified CRISPR) enables live-cell and fixed-cell super-resolution imaging of multiple genes. Nucleic acids research 46, e30.
[0355] Nichols, W. W., Murphy, D. G., Cristofalo, V. J., Toji, L. H., Greene, A. E., and Dwight, S. A. (1977). Characterization of a new human diploid cell strain, IMR-90. Science 196, 60.
[0356] Nishimasu, H., Ran, F. A., Hsu, P. D., Konermann, S., Shehata, S. I., Dohmae, N., Ishitani, R., Zhang, F., and Nureki, O. (2014). Crystal structure of Cas9 in complex with guide RNA and target DNA. Cell 156, 935-949.
[0357] Oberauner-Wappis, L., Loibner, M., Viertler, C., Groelz, D., Wyrich, R., and Zatloukal, K. (2016). Protocol for HER2 FISH determination on PAXgene-fixed and paraffin-embedded tissue in breast cancer. Int J Exp Pathol 97, 202-206.
[0358] Perez-Pinera, P., Kocak, D. D., Vockley, C. M., Adler, A. F., Kabadi, A. M., Polstein, L. R., Thakore, P. I., Glass, K. A., Ousterout, D. G., Leong, K. W., et al. (2013). RNA-guided gene activation by CRISPR-Cas9-based transcription factors. Nature methods 10, 973-976.
[0359] Perry, C., Chung, J. Y., Ylaya, K., Choi, C. H., Simpson, A., Matsumoto, K. T., Smith, W. A., and Hewitt, S. M. (2016). A Buffered Alcohol-Based Fixative for Histomorphologic and Molecular Applications. J Histochem Cytochem 64, 425-440.
[0360] Qi, L. S., Larson, M. H., Gilbert, L. A., Doudna, J. A., Weissman, J. S., Arkin, A. P., and Lim, W. A. (2013). Repurposing CRISPR as an RNA-guided platform for sequence-specific control of gene expression. Cell 152, 1173-1183.
[0361] Qin, P., Parlak, M., Kuscu, C., Bandaria, J., Mir, M., Szlachta, K., Singh, R., Darzacq, X., Yildiz, A., and Adli, M. (2017). Live cell imaging of low- and non-repetitive chromosome loci using CRISPR-Cas9. Nat Commun 8, 14725.
[0362] Richardson, C. D., Ray, G. J., DeWitt, M. A., Curie, G. L., and Corn, J. E. (2016). Enhancing homology-directed genome editing by catalytically active and inactive CRISPR-Cas9 using asymmetric donor DNA. Nature biotechnology 34, 339-344.
[0363] Rouillard, J. M. (2003). OligoArray 2.0: design of oligonucleotide probes for DNA microarrays using a thermodynamic approach. Nucleic acids research 31, 3057-3062.
[0364] Sapranauskas, R., Gasiunas, G., Fremaux, C., Barrangou, R., Horvath, P., and Siksnys, V. (2011). The Streptococcus thermophilus CRISPR/Cas system provides immunity in Escherichia coli. Nucleic acids research 39, 9275-9282.
[0365] Schneider, C. A., Rasband, W. S., and Eliceiri, K. W. (2012). NIH Image to ImageJ: 25 years of image analysis. Nature methods 9, 671-675.
[0366] Shaffer, S. M., Wu, M. T., Levesque, M. J., and Raj, A. (2013). Turbo FISH: a method for rapid single molecule RNA FISH. PLoS One 8, e75120.
[0367] Shao, S., Chang, L., Sun, Y., Hou, Y., Fan, X., and Sun, Y. (2018). Multiplexed sgRNA Expression Allows Versatile Single Nonrepetitive DNA Labeling and Endogenous Gene Regulation. ACS Synth Biol 7, 176-186.
[0368] Shi, X., Seluanov, A., and Gorbunova, V. (2007). Cell divisions are required for L1 retrotransposition. Mol Cell Biol 27, 1264-1270.
[0369] Singh, D., Sternberg, S. H., Fei, J., Doudna, J. A., and Ha, T. (2016). Real-time observation of DNA recognition and rejection by the RNA-guided endonuclease Cas9. Nat Commun 7, 12778.
[0370] Singh, D., Wang, Y., Mallon, J., Yang, O., Fei, J., Poddar, A., Ceylan, D., Bailey, S., and Ha, T. (2018). Mechanisms of improved specificity of engineered Cas9s revealed by single-molecule FRET analysis. Nature structural & molecular biology 25, 347-354.
[0371] Sternberg, S. H., LaFrance, B., Kaplan, M., and Doudna, J. A. (2015). Conformational control of DNA target cleavage by CRISPR-Cas9. Nature 527, 110-113.
[0372] Sternberg, S. H., Redding, S., Jinek, M., Greene, E. C., and Doudna, J. A. (2014). DNA interrogation by the CRISPR RNA-guided endonuclease Cas9. Nature 507, 62-67.
[0373] Taupin, P. (2007). BrdU immunohistochemistry for studying adult neurogenesis: paradigms, pitfalls, limitations, and validation. Brain Res Rev 53, 198-214.
[0374] Tse, C. H., Hwang, H. C., Goldstein, L. C., Kandalaft, P. L., Wiley, J. C., Kussick, S. J., and Gown, A. M. (2011). Determining true HER2 gene status in breast cancers with polysomy by using alternative chromosome 17 reference genes: implications for anti-HER2 targeted therapy. J Clin Oncol 29, 4168-4174.
[0375] Varga, Z., Tubbs, R. R., Wang, Z., Sun, Y., Noske, A., Kradolfer, D., Bosshard, G., Jochum, W., Moch, H., and Ohlschlegel, C. (2012). Co-amplification of the HER2 gene and chromosome 17 centromere: a potential diagnostic pitfall in HER2 testing in breast cancer. Breast Cancer Res Treat 132, 925-935.
[0376] Wang, H., Nakamura, M., Abbott, T. R., Zhao, D., Luo, K., Yu, C., Nguyen, C. M., Lo, A., Daley, T. P., La Russa, M., et al. (2019). CRISPR-mediated live imaging of genome editing and transcription. Science 365, 1301.
[0377] Wang, S., Su, J.-H., Beliveau, B. J., Bintu, B., Moffitt, J. R., Wu, C.-t., and Zhuang, X. (2016). Spatial organization of chromatin domains and compartments in single chromosomes. Science 353, 598.
[0378] Wang, T., Wei, J. J., Sabatini, D. M., and Lander, E. S. (2014). Genetic Screens in Human Cells Using the CRISPR-Cas9 System. Science 343, 80.
[0379] Wang, Y., Mallon, J., Wang, H., Singh, D., Hyun Jo, M., Hua, B., Bailey, S., and Ha, T. (2020). Real-time observation of Cas9 postcatalytic domain motions. Proceedings of the National Academy of Sciences 118.
[0380] Williams, E. S., and Bailey, S. M. (2009). Chromosome orientation fluorescence in situ hybridization (CO-FISH). Cold Spring Harbor protocols 2009, pdb prot5269.
[0381] Wolff, A. C., Hammond, M. E., Hicks, D. G., Dowsett, M., McShane, L. M., Allison, K. H., Allred, D. C., Bartlett, J. M., Bilous, M., Fitzgibbons, P., et al. (2013). Recommendations for human epidermal growth factor receptor 2 testing in breast cancer: American Society of Clinical Oncology/College of American Pathologists clinical practice guideline update. J Clin Oncol 31, 3997-4013.
[0382] Wu, X., Mao, S., Ying, Y., Krueger, C. J., and Chen, A. K. (2019). Progress and Challenges for Live-cell Imaging of Genomic Loci Using CRISPR-based Platforms. Genomics Proteomics Bioinformatics 17, 119-128.
[0383] Xu, Q., Schlabach, M. R., Hannon, G. J., and Elledge, S. J. (2009). Design of 240,000 orthogonal 25mer DNA barcode probes. Proceedings of the National Academy of Sciences 106, 2289.
[0384] Yarrington, R. M., Verma, S., Schwartz, S., Trautman, J. K., and Carroll, D. (2018). Nucleosomes inhibit target cleavage by CRISPR-Cas9 in vivo. Proceedings of the National Academy of Sciences of the United States of America 115, 9351-9358.
[0385] Zhang, K., Deng, R., Teng, X., Li, Y., Sun, Y., Ren, X., and Li, J. (2018). Direct Visualization of Single-Nucleotide Variation in mtDNA Using a CRISPR/Cas9-Mediated Proximity Ligation Assay. J Am Chem Soc 140, 11293-11301.

### Example 3: Achieving Single Nucleotide Sensitivity in Direct Hybridization Genome Imaging

[0386] Single-nucleotide variation (SNV) is the most common type of mutation and is associated with many diseases¹. Although sequencing approaches can detect SNVs, they do not report on spatial information. Fluorescence in situ hybridization (FISH) can reveal the three-dimensional location of genomic sites of interest through annealing of fluorescently labeled oligonucleotide probes to denatured chromosomal DNA, but it generally cannot differentiate highly similar sequences. Advanced FISH-based methods have been developed to detect SNVs by targeting RNA molecules²⁻⁸, which requires the target RNA to be actively transcribing, thereby excluding nongenic regions and inactive or stochastically expressed genes, or by visualizing SNVs in DNA⁹⁻¹². Endogenous nuclear SNVs can be imaged indirectly through amplification by in situ PCR or CRISPR/Cas9-binding-mediated in situ rolling circle amplification followed by probe hydrization^{11, 12} However, the vast majority of genome imaging has been performed through direct hybridization, but to date, direct hybridization FISH with SNV sensitivity has not been realized. A single guide (sg) version of GOLDFISH (genome oligopaint via local denaturation FISH) was developed to address this technical gap.

### Methods

### Human Cell Lines

[0387] HEK293 human embryonic cells were purchased from the American Type Culture Collection (ATCC. CRL-1573) and cultured in DMEM with 4.5 g/L glucose, L-glutamine, and sodium pyruvate (Corning, 10-013-CV) supplemented with 10% heat inactivated fetal bovine serum (FBS, Corning 35-011-CV). Hutchinson-Gilford Progeria Syndrome (HGPS) fibroblasts were purchased from the Progeria Research Foundation and cultured in high glucose DMEM without L-glutamine (ThermoFisher, 11960-440) supplemented with 20% FBS (Corning, 35-011-CV), 1% Penicillin-Streptomycin (ThermoFisher, 15140-122) and 1% GlutaMAX (ThermoFisher, 35050-061). All cells were maintained at 37° C. in 5% CO₂ and imaging dishes were coated with 1 ug/cm2 fibronectin then air dried before plating.

Expression and Purification of Cas9 and Rep-X Cas9 nickase and eCas9 nickase were prepared as described previously with modifications²¹. Cas9 nickase was expressed using the pMJ826 plasmid (addgene, 39316). Mutagenesis was carried out to introduce the H840A mutation into eSpCas9(1.1) variant using pJSC114 plasmid (addgene, 101215) and QuikChange Lightning Site-Directed Mutagenesis Kit (Agilent, 210518). eCas9 nickase was expressed using the mutagenesis-modified pJSC114 plasmid. The plasmids were transformed into NEB BL21(DE3) competent cells (New England Biosciences). Cultures were maintained in Terrific Broth (Invitrogen) supplemented with 0.4% glycerol at 37° C. until induction at OD₆₀₀=0.5-0.6 at which point the temperature was lowered to 18° C. and cultures were induced with 0.5 mM IPTG (GoldenBio). Pellets were harvested after 16-18 h and resuspended in lysis buffer (50 mM Tris-HCl, 500 mM NaCl, 5% glycerol, 1 tablets per 50 ml protease inhibitor (EDTA-free, Roche), 0.2 mM PMSF, 1 mM TCEP, 1 mg/ml lysozyme, pH 7.5) and sonicated at 30% amplitude with 2 s on, 4 s duty cycle for 2 min, 3 times. Lysate was spun down and supernatant was mixed with 2 ml Ni-NTA resin (Qiagen) per 50 ml sample and incubated for 1 h at 4° C., then spun down and decanted. Resin was incubated with Wash Buffer (50 mM Tris-HCl, 500 mM NaCl, 10 mM imidazole, 5% glycerol, 1 mM TCEP, pH 7.5) at 4° C. for 5 min repeated 4 times then added to gravity column. Colum was then incubated with Elution Buffer (50 mM Tris-HCl, 500 mM NaCl, 1 mM TCEP, 300 mM imidazole, 5% glycerol, pH 8-8.5) and fractions were analyzed via denaturing PAGE. Samples were then desalted and concentrated using a 40 kD cut off filter into storage buffer (300 mM NaCl, 10 mM Tris-HCl, 0.1 mM EDTA, 50% glycerol, pH 7.5). Ni-NTA purification with desalting showed sufficient purity and activity for GOLD FISH applications and did not require further size selection chromatography.

[0388] Rep-X was prepared the same as previously described¹⁴. pET28a(+) with rep (C18L/C43S/C167V/C612A/S400C) was transformed into E. coli B21(DE3) (Sigma-Aldrich, CMC0014). A single colony was picked and grown in TB at 37° C. overnight, followed by 30° C. overnight. When OD reached the range between 0.3 and 0.4, the cells were moved to an 18° C. incubator. When OD reaches 0.6 to 0.8, the cells were induced expression with 0.5 mM IPTG and continue growth overnight. The cells were harvested by centrifugation for 15 min at 5000 rpm and 4° C. The pellet was resuspended in 40 ml of the lysis buffer (50 mM Tris-HCl pH 7.5, 5 mM Imidazole, 200 mM NaCl, 20% (w/v) sucrose, 15% (v/v) glycerol, 17.5 ug/ml PMSF, and 0.2 mg/ml Lysozyme) and sonicate to lyse the cells. The lysed cell mix was centrifuged at 14,000 rpm at 4° C. for 30-60 min and collect the supernatant. The supernatant was stir-mixed with pre-equilibrated Ni-NTA resin for 1.5 hours at 4° C. Ni-NTA purification was performed by washing the protein-bound resin with buffer A (50 mM Tris-HCl pH 7.5, 5 mM Imidazole, 150 mM NaCl, 25% (v/v) glycerol), followed by buffer A1M (50 mM Tris-HCl pH 7.5, 5 mM Imidazole, 1 M NaCl, 25% (v/v) glycerol) to remove any DNA residue, and final washed the protein-bound resin with buffer A, then eluted the Rep variant with imidazole buffer (50 mM Tris-HCl pH 7.5, 205 mM Imidazole, 150 mM NaCl, 25% (v/v) glycerol). 20 μM eluted Rep variant was mixed with 100 μM BMOE crosslinker to self-crosslink into Rep-X. The reaction was stir-mixed at room temperature for 1 hour. The excess crosslinker and Imidazole was removed by an overnight dialysis and stored in Rep-X storage buffer (50% glycerol, 600 mM NaCl, 50 mM Tris-HCl pH 7.5) at −80° C.

### Genome Sequences

[0389] The GRCh38.p13 Primary Assembly was used in this study and downloaded from NCBI. The coordinates of target loci are listed below:
[0390] MUC4-R region (Chr3: 195788656-195778790)
[0391] MUC4-NR region (Chr3: 195807684-195808777)
[0392] LMNA region (Chr1: 156137082-156138607)

### Sggoldfish Guide RNA and Probe Design

[0393] The SNV site should be within a protospacer of SpCas9. Because the previous study has demonstrated to target SNV at the PAM-proximal region¹¹, here we focused on testing SNVs located at PAM-distal region. The 13^{rd} to 18^{th} positions from the PAM are ideal (FIG. 15D). Because eCas9 can tolerate one PAM-distal mismatch, but two PAM-distal mismatches essentially inhibit cleavage under our conditions (FIGS. 15D, 16C, 20A and 20B), and additional mismatch was intentionally introduced into the guide RNA (e.g., the U at the 8^{th} position from the 5′ of crRNA in gMUC4-TwoMM and gMUC4-OneMM, FIG. 15C). Oligo FISH probes for sgGOLDFISH were designed using Oligoarray²². The target DNA sequence (˜1.5 kb) immediately following the target protospacer is input into the Oligoarray 2.1 with the following constraints: Length: 18- to 24-nt; Tm: 70° C. to 90° C.; % GC: 30-70; Max. Tm for structure: 54° C.; Min. Tm to consider X-hybrid: 54° C.; and there was no consecutive repeat of 5 or more identical nucleotides. Probes that can non-specifically bind to human genome, human noncoding RNA and E. coli tRNA were removed. The sequences of probes and are listed in Supplementary Table 2.

### Preparation of DNA and RNA

[0394] The designed oligo FISH probes (without any labeling/modification) were purchased from IDT, and fluorescently labeled as previously described²³. Briefly, to conjugate an amino-ddUTP at the 3′ end of each oligonucleotide, 66.7 μM DNA oligonucleotides, 200 μM Amino-11-ddUTP (Lumiprobe) and 0.4 U/μl Terminal Deoxynucleotidyl Transferase (TdT, Thermo Scientific, EP0162) were mixed in 1×TdT Reaction buffer (Thermo Scientific) and incubated overnight at 37° C. The reaction was cleaned up by ethanol precipitations and P4 beads (Bio-Rad, #1504124) spin columns. Next, the DNA oligonucleotides conjugated with amino-ddUTP were mixed with 100 μg of Cy3-NHS or Cy5-NHS (Lumiprobe or GE Healthcare) in 0.1 M sodium bicarbonate and incubated overnight at room temperature, and cleaned up by ethanol precipitations and P4 beads (Bio-Rad, #1504124) spin columns. Unlabeled oligonucleotides were removed by high-performance liquid chromatography (HPLC). The DNA substrates for in vitro cleavage assays are synthesized using Phusion® Hot Start Flex 2× Master Mix (NEB, M0536S) and purified using GeneJET PCR Purification Kit (Thermo Scientific, K0701). The primers are purchase from IDT and sequences are listed in Supplementary Table 2. For the guide RNA in FIG. 15C, crRNA was synthesized in vitro using HiScribe™ T7 Quick High Yield RNA Synthesis Kit (NEB, E2050S) according to the manufacturer's instructions, and purified by polyacrylamide gel electrophoresis. Alt-R® CRISPR-Cas9 tracrRNA (IDT) was purchase from IDT. The guide RNA was annealed by mixing crRNA and tracrRNA at 1:1 ratio in Nuclease Free Duplex Buffer (IDT), and incubating at 95° C. for 30 seconds, then slowly cooling down to room temperature over 1 hour. For other guide RNAs used in this study, the guide RNA was synthesized using EnGen® sgRNA Synthesis Kit, S. pyogenes (NEB, E3322V) according to the manufacturer's instructions. The template DNA sequences are listed in Supplementary Table 2.

### In Vitro Cleavage Assay

[0395] For FIGS. 15D, 20B, Cas9 RNP was assembled by mixing 200 nM eCas9 nickase with 400 nM guide RNA in the cleavage buffer (20 mM Hepes pH 7.5, 100 mM KCl, 7 mM MgCl₂, 5% (v/v) glycerol and 0.1% (v/v) TWEEN-20, freshly added 1 mM DTT), and incubated for 10 min at room temperature. Then 4 nM DNA substrate was added, and incubated at 37° C. for 1 hour. Next, 80 unites/mL of proteinase K (NEB, P8107S) was added to the reaction, and incubated at 37° C. for 30 min. The reaction was directly loaded into the agarose gel for electrophoresis. For FIG. 17B, 400 nM Cas9 nickase RNP cleaving the top strand and 400 nM Cas9 nickase RNP cleaving the bottom strand were assemble by mixing Cas9 nickase and corresponding guide RNA at 1:1 ratio and incubated for 10 min at room temperature. Then, 600 ng PCR-synthesized DNA substrate (FIG. 15C) was added to the mixture and incubated for 1 hour at 37° C. Next, 80 unites/mL of proteinase K (NEB, P8107S) was added to the reaction, and incubated at 37° C. for 30 min. The reaction was heated at 90° C. for 1 min to dissociate the two parts of the double-nicked DNA, followed by agarose gel electrophoresis.

### Cell Fixation

[0396] The HEK293T or HGPS cells adhered to the glass surface of an imaging dish were fixed at −20° C. for 15 min in pre-chilled MAA solution (methanol and acetic acid mixed at 1:1 ratio), then washed three times (5 min each wash at room temperature unless indicated) with PBS. The following steps were only performed in the SSB-ddPCR and the sgGOLDFISH in FIGS. 1b and 1c. The 0.1% pepsin in 0.1 M HCl was applied to the fixed HEK293T cells and incubated for 45 s at 37° C. The cells were washed with PBS once, and incubated in 70%, 90% and 100% EtOH at room temperature, each for 1 min. The cells were then washed three times with PBS.

### SSB-ddPCR

[0397] The SSB-ddPCR was performed similarly to DSB-ddPCR¹⁷ with modifications (FIG. 16A). The fixed and pepsin treated HEK293T cells adhered to the glass surface of the imaging dish were incubated in the binding-blocking buffer (20 mM Hepes pH 7.5, 100 mM KCl, 7 mM MgCl₂, 5% (v/v) glycerol and 0.1% (v/v) TWEEN-20, 1% (w/v) BSA, freshly added 1 mM DTT, freshly added 0.1 mg/ml E. coli tRNA) for 10 min at 37° C. Next, 100 nM eCas9 nickase was mixed with 200 nM gMUC4-TwoMM or gMUC4-OneMM in the binding-blocking buffer, and incubated for 10 min at room temperature. The 100 nM eCas9 nickase RNP was then applied to the cells, and incubated for 45 min at 37° C. After that, 2 mM ATP was supplied to the 100 nM eCas9 nickase RNP solution (i.e., the 100 nM eCas9 nickase RNP in the binding-blocking buffer supplied with 2 mM ATP), and incubated the cells in the solution for another 90 min at 37° C., followed by PBS wash 3 times. So far, these steps are the same as sgGOLDFISH in FIGS. 1b and 1c, expect that the Rep-X is omitted in SSB-ddPCR. To harvest genomic DNA from the cells, 60 mAU/mL proteinase K in PBS from DNeasy Blood & Tissue Kits (Qiagen, 69504) was applied to the cells and incubated for 30 min at 37° C. The solution was collected from the imaging dish, and genomic DNA was extracted using the DNeasy Blood & Tissue Kits by following manufacturer's protocol. The extracted genomic DNA (less than 8 ng/uL) was further treated with 400 nM Cas9 nickase RNP using the corresponding guide RNA in 1× NEBuffer r3.1 (NEB, B7203S) for 1 hour at 37° C. Next, 45 unit/mL proteinase K (NEB, P8107S) was added to the reaction and incubated for 30 min at 37° C. The genomic DNA was purified using Genomic DNA Clean & Concentrator-10 (Zymo, D4011) and eluted in water. Finally, 20 to 50 ng the genomic DNA was mixed with 250 nM probes, 900 nM primers and 250 unit/mL Eael (NEB, R0508S) in 1× ddPCR Supermix for Probes (no dUTP) (Bio-Rad, 1863023). Droplets were created using Droplet Generation Oil for Probes, DG8 Gaskets, DG8 Cartridges, and QX200 Droplet Generator (Bio-Rad); Droplets were transferred to a 96-well PCR plate and heat-sealed using PX1 PCR Plate Sealer (Bio-Rad). PCR amplification was performed with the following conditions: 95° C. for 10 min, 40 cycles of (94° C. for 30 sec, 55° C. for 30 sec, 72° C. for 2 min), 98° C. for 10 min, 12° C. hold. Droplets were then individually scanned using the QX200 Droplet Digital PCR system (Bio-Rad). To generate the standard curve, gMUC4-OneMM and dCas9 (instead of eCas9 nickase) was applied to the fixed and pepsin treated HEK293T cells as described above, and the genomic DNA was harvested (FIG. 18, Step 1). Half of the genomic DNA was treated with Cas9 nickase RNP as described above, which produces “ss-nicked genomic DNA”. Another half of the genomic DNA (less than 8 ng/uL) was treated with 0.2 unit/uL MseI (NEB, R0525S) for 1 hour at 37° C., and MseI was deactivated by incubating the reaction 20 min at 65° C. Following the deactivation, the MseI-treated genomic DNA was purified using Genomic DNA Clean & Concentrator-10 (Zymo, D4011) and eluted in water, which produces “ds-cut genomic DNA”. The “ss-nicked genomic DNA” and “ds-cut genomic DNA” were then mixed at different ratios for ddPCR as described.

sgGOLDFISH

[0398] The cells adhered to the glass surface of the imaging dish were incubated in the binding-blocking buffer (20 mM Hepes pH 7.5, 100 mM KCl, 7 mM MgCl₂, 5% (v/v) glycerol and 0.1% (v/v) TWEEN-20, 1% (w/v) BSA, freshly added 1 mM DTT, freshly added 0.1 mg/ml E. coli tRNA) for 10 min at 37° C. Next, 100 nM eCas9 nickase was mixed with 200 nM guide RNA in the binding-blocking buffer, and incubated for 10 min at room temperature. If the MUC4-R region was targeted, additional 20 nM eCas9 nickase and 40 nM gMUC4-R were also assembled in the binding-blocking buffer. After that, 2 mM ATP and 300 uM Rep-X was supplied to the 100 nM eCas9 nickase RNP solution (i.e., the 100 nM eCas9 nickase RNP in the binding-blocking buffer supplied with 2 mM ATP and 300 uM Rep-X), and incubated the cells in the solution for another 90 min at 37° C., followed by PBS wash 3 times. Next, RNase Cocktail™ Enzyme Mix (Invitrogen, AM2286) was diluted 100 times in PBS and incubated with the cells for 1 hour at 37° C. The cells were washed three times with PBS. The cells were then incubated in freshly made hybridization buffer (20% (v/v) formamide, 2× saline-sodium citrate (SSC), 0.1 mg/mL E. coli tRNA, 10% (w/v) dextran sulfate, 2 mg/mL BSA) for 10 min at room temperature. Fluorescently labeled oligo FISH probes (1 nM for MUC4-R, 2.5 nM per oligo FISH probe for MUC4-NR and LMNA, i.e., 57.5 nM and 90 nM final probe concentration for MUC4-NR and LMNA) in the hybridization buffer were applied to the cells and incubated for 1 hour at room temperature (repetitive targets) or 37° C. (non-repetitive targets). The cells were washed twice (10 min each wash) with wash buffer (25% formamide, 2×SSC) at 37° C. and once with PBS at room temperature for 5 min. One drop of Hoechst 33342 Ready Flow™ Reagent (Invitrogen, R37165) was mixed with 2 ml of PBS and incubated with the cells for 2 min at room temperature. Finally, imaging buffer (2×SSC and saturated Trolox (>5 mM), 0.8% (w/v) dextrose) supplied with GLOXY (1 mg/ml glucose oxidase, 0.04 mg/ml catalase) was added to the cells for imaging.

### Immunofluorescence

[0399] For progerin immunofluorescence, the cells after sgGOLDFISH were incubated in IF buffer (1× Blocker™ BSA in PBS (Thermo Scientific, 37525) supplied with 0.1% Tween-20) at room temperature for 20 min. Progerin Monoclonal Antibody (13A4) (Thermo Scientific, 39966) was diluted 500 times in the IF buffer, and applied to the cells for overnight incubation at 4° C. The cells were washed three times with PBS, and incubated with 500 times diluted Alexa750-labeled secondary antibody (Invitrogen, A-21037) in the IF buffer for 30 min at room temperature. Finally, the cells were wash 3 times with PBS and imaged in the imaging buffer. For Lamin A/C immunofluorescence, the cells after fixation were incubated in IF buffer (1× Blocker™ BSA in PBS (Thermo Scientific, 37525) supplied with 0.1% Tween-20) at room temperature for 20 min. Anti-Lamin A+Lamin C antibody [4C11](Abcam, ab238303) was diluted 500 times in the IF buffer, and incubated with the cells for 1 hour at room temperature. The cells were washed three times with PBS, and incubated with 500 times diluted Alexa750-labeled secondary antibody (Invitrogen, A-21037) in the IF buffer for 30 min at room temperature. Finally, the cells were wash 3 times with PBS and imaged in the imaging buffer.

### Microscopy

[0400] sgGOLDFISH imaging was performed using Nikon Eclipse Ti microscope equipped with Nikon perfect focus system, Xenon arc lamp. The system was driven by Elements software. Nikon 60×/1.49 NA objective (CFI Apo TIRF) was used. Emission was collected using a custom laser-blocking notch filter (ZET488/543/638/750M) from Chroma. Images were recorded using an electron-multiplying charge-coupled device (Andor iXon 888). Images were recorded as z-stacks (20 to 30 steps), with 300 nm to 500 nm step size.

### Dna-Free Base Editing in HGPS Fibroblasts

[0401] The guide RNA for base editor to correct the HGPS mutations (LMNA-VRQRABE-sgRNA) was purchased from IDT (see Table 2 for sequence). To prepare DNA template for VRQR-ABE7.10max mRNA, pUC19 (NEB, N3041S) was linearized using EcoRI-HIF (NEB, R3101S) and HindIII-HF (NEB, R3104S). VRQR-AEB fragment was PCR-synthesized using the Plasmid #154429 (addgene) and VRQR-AEB-primer-F and VRQR-AEB-primer-R (see Supplementary Table 2 for primer sequences), and gel purification was carried out to remove non-specific products. Mutagenesis was performed using pcDNA3.3-eGFP (addgene, Plasmid #26822) and T7-Mutagenesis-primer-F and T7-Mutagenesis-primer-R to replace the “G” following the T7 promoter sequence with an “A” by the QuikChange Lightning Site-Directed Mutagenesis Kit (Agilent, 210518). T7-5′UTR fragment was PCR-synthesized using the mutagenesis-modified pcDNA3.3-eGFP and T7-5′UTR-primer-F and T7-5′UTR-primer-R. The 3′UTR fragment was PCR-synthesized using the mutagenesis-modified pcDNA3.3-eGFP and 3′UTR-primer-F and 3′UTR-primer-R. Next, the linearized pUC19, VRQR-AEB fragment, T7-5′UTR fragment, 3′UTR fragment was assembled into a plasmid (VRQRABE-mRNA plasmid) using NEBuilder HiFi DNA Assembly Master-Mix (UEB, E2621 S) according to manufacturer's protocol. The linear VRQRABE-mRNA DNA template was PCR-synthesized using VRQRABE-mRNA plasmid, VRQRABE-mRNA-linearTemplate-F and VRQRABE-mRNA-linearTemplate-R. All PCR reactions were performed using Q5® Hot Start High-Fidelity 2× Master Mix (NEO, M494S). The in vitro transcription of VRQR-ABE7.10max mRNA reaction contains 50 ng/uL linearized VRQRABE-mRNA DNA template, ATP/CTP/GTP (5 mM each), 5 mM N1-methylpseudouridine (TriLink, N-108-1), 4 mM CleanCap AG (TriLink, N-7113), 1 unit/uL Murine RNase Inhibitor (NEB, M0314S), 0.002 units/uL Yeast inorganic Pyrophosphatase (NEB, M2403S) and 8 units/uL T7 RNA Polymerase (NEB, M0251S) in the transcription buffer (40 mM Tris-HCl pH 8, 20 mM spermidine, 0.02% (v/v) Triton X-100, 165 mM magnesium acetate, freshly added 10 mM DTT). The in vitro transcription reaction was incubated at 37° C. for 2 hours, and treated with DNase I by supplying with 1× DNase buffer (NEB, B0303S) and 0.3 units/uL DNase I (M0303S) and incubating at 37° C. for 20 min. The reaction was purified using Megaclear™ Transcription Clean-Up Kit (Invitrogen, AM1908), and dephosphorylated using 0.25 units/uL Antarctic Phosphatase (NEB, M0289S) according to manufacturer's protocol. The VRQR-ABE7.10max mRNA was purified again using the Megaclear™ Transcription Clean-Up Kit. All electroporation experiments were carried out using the Lonza 4D-Nucleofector System. For mRNA editing in HGPS cells, 5 μg of LMNA-VRQRABE-sgRNA was mixed in a total 25 uL volume (SE kit, Lonza) then resuspended with 200k HGPS cells and electroporated using the with CM-120 setting. Cells were maintained at 37° C. in 5% CO₂ for 3 days before collecting genomic DNA using DNeasy Blood & Tissue Kits (Qiagen, 69504) and sequencing.

### Data Analysis for GOLD FISH

[0402] Images were processed using Fiji/ImageJ. Z-stack images were projected to a single plane using the ‘Max Intensity’ Z-Projection function. The contrasts of images were linearly adjusted by changing the minimum and maximum values using the ‘brightness/contrast’ function in ImageJ for optimal visualization purpose only. FISH-quant was used to find foci in each cell and fitted with three-dimensional (3D) Gaussian function²⁴. The nuclear edge, nuclear area and the distance from a FISH focus to the nuclear edge were analyzed using custom-written MATLAB scripts.

### Results

[0403] The original GOLDFISH method used multiple guide RNAs tiling a genomic region of interest in complex with Cas9 nickase (SpCas9 with H840A mutation¹³) to cleave genomic DNA at multiple sites (FIG. 14A)¹⁴. This allowed local denaturation of targeted genomic DNA by loading an engineered helicase, Rep-X, to the cleaved strands so that DNA downstream is unwound to expose binding sites for FISH probes. Because only several kilobases of DNA unwound, GOLDFISH greatly reduces nonspecific binding of FISH probes to other genomic regions compared to conventional FISH that globally denatures genomic DNA. Because GOLDFISH requires Cas9 cleavage which is much more sequence-stringent compared to Cas9 binding, it also has superior signal to background ratio compared to methods that rely on Cas9 binding¹⁴.

[0404] The use of multiple cut sites in GOLDFISH enabled high efficiency labeling even if the cleavage efficiency at a single site is not very high. But multiple cut sites made it impossible to make FISH labeling sensitive to an SNV. It was hypothesized that, instead of using multiple guide RNAs, GOLDFISH using a single guide RNA (hence called sgGOLDFISH, FIG. 14B) may achieve SNV sensitivity if the Cas9 cleavage activity is optimized to be SNV-sensitive (FIG. 12A). If so, by rationally designing guide RNA and choosing engineered Cas9 variant that has higher cleavage specificity, sgGOLDFISH can preferentially label one of the two alleles even when the two alleles differ by only a single nucleotide (FIG. 12A). To test this concept, a Cas9 ribonucleoprotein (RNP) variant was assembled by combining the specificity-improving mutations in eSpCas9(1.1)¹⁵ with a 5′ extended guide RNA¹⁶ (hereinafter called eCas9 RNP, which cleaves both the target and nontarget strands (FIG. 15A), and tested its cleavage activity using an in vitro cleavage assay (FIGS. 15B, 15C). Efficient cleavage was observed for 4 out of 5 guide RNAs with 1 PAM-distal mismatch, but no cleavage activity for five guide RNAs containing 2 PAM-distal mismatches (FIG. 15D). Such specificity was not observed with canonical guide RNA in complex with eCas9 (FIG. 15E). These data indicate that adding an extra PAM-distal mismatch can drastically reduce the cleavage activity of eCas9 RNP.

[0405] Cleaving only the non-target strand by Cas9 nickase is sufficient for Rep-X unwinding the downstream genomic DNA and FISH probe hybridization in GOLDFISH¹⁴. The eCas9 (H840A) variant (hereinafter called eCas9 nickase)¹³ was therefore created, and its cleavage activity in fixed cells was measured (note that in GOLDFISH, cleavage and subsequent steps are performed in fixed cells). The fraction of double-strand breaks (DSBs) at a target site in the cell population can be measured using a droplet digital PCR (ddPCR) assay¹⁷. ddPCR, however, is not sensitive to single-strand breaks (SSBs). Here the ddPCR assay is extended through an additional nicking step to make it SSB-sensitive (FIGS. 16A-16C, 17A-17C, 18). Using this assay with the eCas9 nickase in complex with a guide RNA that contains two mismatches against the MUC4 gene (gMUC4-TwoMM), or a guide RNA with one mismatch (gMUC4-OneMM) (FIG. 15C), <5% and ˜40% DNA was observed being cleaved, respectively (FIGS. 16B, 16C). These data demonstrate that an extra mismatch drastically reduced the cleavage efficiency in fixed cells so that a contrast of about an order of magnitude can be obtained.

[0406] sgGOLDFISH was first tested in proteinase-treated cells (HEK293T) using the eCas9 nickase complexed with the gMUC4-OneMM or gMUC4-TwoMM and 23 Cy5-labeled FISH probes against a 1.5-kb non-repetitive region in the MUC4 gene (MUC4-NR) adjacent to the target protospacer (FIG. 19A). Another guide RNA (gMUC4-R) and a Cy3-labeled FISH probe were also designed against a repetitive region (MUC4-R) 19-kb from the MUC4-NR region to evaluate the specificity and sensitivity of sgGOLDFISH (FIG. 19A). With gMUC4-OneMM, on average 0.56 MUC4-NR FISH foci per cell (foci/cell) were detected (FIG. 12B). With gMUC4-TwoMM, on average 0.07 foci/cell were detected (FIG. 12B). With concurrent use of gMUC4-R and gMUC4-OneMM, we found 52 of 56 MUC4-NR foci colocalized with MUC4-R foci, indicating high labeling specificity of sgGOLDFISH (FIG. 12B). There were a total of 202 MUC4-R foci among which 52 showed colocalization with MUC4-NR, suggesting about 25% detection efficiency of sgGOLDFISH. The sgGOLDFISH experiment was repeated without the proteinase treatment and 0.45 foci/cell was observed for gMUC4-OneMM and 0.03 foci/cell was observed for gMUC4-TwoMM, again demonstrating SNV-sensitivity (FIG. 19B). sgGOLDFISH was also performed against the LMNA gene using doubly mismatched (gLMNA-MUT) or singly mismatched (gLMNA-WT) guide RNA (FIGS. 20A, 21A). 1.17 foci/cell was observed for gLMNA-WT and 0.09 foci/cell for gLMNA-MUT (FIG. 12C). These data show that a single-nucleotide difference can result in about an order of magnitude difference in sgGOLDFISH detection efficiency. The full width at half maximum of Gaussian fit to the imaged LMNA foci is 617±92 nm (mean±SD, FIG. 21), indicating sgGOLDFISH provides well-defined spots suitable for subnuclear localization analysis.

[0407] sgGOLDFISH was next applied in fibroblasts derived from the Hutchinson-Gilford progeria syndrome (HGPS) patient. The HGPS cell has one copy of normal LMNA gene (LMNA-WT), and one copy of mutated LMNA gene (LANA-MUT) that carries a point mutation (c. 1824 C>T) (FIG. 13A), which causes expression of progerin, a truncated gene product, and alterations of nuclear shape¹⁸. The gLMNA-MUT guide RNA described above has two mismatches against the wild-type LMNA sequence and one mismatch against the progeria mutant sequence (FIG. 21C) and gLMNA-WT has one mismatch against the wild-type and two mismatches against the mutant (FIG. 21D). Therefore, sgGOLDFISH using gLMNA-MUT should preferentially label the mutant allele whereas the wild type allele is preferentially labeled when gLMNA-WT is used (FIG. 12A). To test this prediction, HGPS mutation-corrected fibroblasts were created by delivering adenine base editor ABE7.10max-VRQR (ABE) mRNA and corresponding sgRNA into the HGPS cells¹⁹ (FIG. 13B). This DNA-free approach efficiently corrected the HGPS mutation (>94% efficiency) without the risk of unwanted DNA integration into the genome (FIGS. 13C, 22A). Consistently, the fraction of morphologically abnormal nuclei was significantly reduced after the ABE treatment (FIGS. 22B, 22C).

[0408] In order to test if sgGOLDFISH preferentially labels the progeria mutant allele with gLMNA-MUT, a cell mixture that contains 50% uncorrected HGPS cells and 50% ABE-corrected HGPS cells was made (hereinafter called 1:1 mixture, FIG. 22D). sgGOLDFISH against the LMNA gene using gLMNA-MUT was applied to the 1:1 mixture in parallel with progerin immunofluorescence, and a cell with at least one LMNA sgGOLDFISH spot was assigned as a “mutant-positive cell” (FIGS. 13D, FIG. 23A). The progerin immunofluorescence intensity averaged over the nucleus was comparable between the mutant-positive cells and untreated HGPS cells, but was significantly lower for cells randomly selected from the 1:1 mixture (FIG. 13F), consistent with reduced progerin expression after the HGPS mutation correction¹⁹. Therefore, sgGOLDFISH successfully identified uncorrected HGPS cells from a mixed population.

[0409] Next, sgGOLDFISH was performed in the 1:1 mixture again but using gLMNA-WT instead (FIGS. 13E, 23B). In parallel, GOLDFISH was performed against the MUC4-R region to estimate the cell cycle stage at the same time (FIG. 13E, e.g., detection of two MUC4-R foci indicates G0/G1). It was previously shown that the GOLDFISH detection efficiency of the MUC4-R region in fibroblasts is very high (around 90%)¹⁴. An ABE-corrected HGPS cell should have 2 to 4 copies of LMNA-WT alleles, depending on cell cycle. Therefore, cells with two LMNA foci and two MUC4-R foci, or four LMNA foci and four MUC4-R foci, were assigned as “correction-positive cells” (FIG. 13E). The progerin fluorescence was significantly lower for the correction-positive cells than for cells randomly selected from the 1:1 mixture (FIG. 13G). Taken together, these data provide evidence that sgGOLDFISH can preferentially label the LMNA-WT or the LMNA-MUT alleles even though these two alleles only differ by a single base pair, and that sgGOLDFISH can be used to identify base-edited cells or unedited cells from a heterogeneous population. It was noted that the progerin fluorescence is slightly higher for the correction-positive cells than for ABE-treated HGPS fibroblasts, probably because a small fraction of the LMNA-MUT alleles were labeled giving false positives (FIG. 13G).

[0410] Direct hybridization of probes allows for accurate localization of sequences of interest. To demonstrate sgGOLDFISH for sub-nuclear spatial analysis, the distance of LMNA and MUC4 foci to the nuclear edge in HGPS fibroblasts was measured. The MUC4 foci are closer to the nuclear edge than the LMNA foci (FIGS. 13H, 13I), consistent with Lamin A/C-ChIP (chromatin immunoprecipitation) data from the same HGPS line which showed stronger ChIP signal, which is a measure of proximity to the nuclear membrane, for MUC4 compared to LMNA (FIG. 23C)²⁰.

[0411] Discriminating the LMNA-MUT allele from the LMNA-WT allele requires sgGOLDFISH to distinguish the G-U wobble base pair from A-U base pair (FIGS. 21C, 21D), which has been shown to be difficult using oligonucleotide probes alone¹⁰. Moreover, existing methods visualizing SNVs in nuclear DNA involve proteinase treatment that excludes concurrent immunofluorescence and unavoidably perturbs nuclear architecture^{11, 12}. In contrast, proteinase treatment is not necessary for sgGOLDFISH. Although the cleavage activity of Cas9 is dependent on local sequence, it can be fine-tuned through guide RNA by adding/removing intentionally introduced mismatches or the 5′ extra guanine for new targets¹⁶. Overall, given the single-nucleotide sensitivity, immunofluorescence compatibility, the ability to accurately localize SNVs, and relatively broad SNV targeting scope (see Table 3 for comparison with other methods), sgGOLDFISH will be of value for researchers to study, for example, point mutation-related diseases or detect precise genome editing such as base editing.

[0412] Table 3|Comparison of sgGOLDFISH with other nuclear DNA FISH methods. CasPLA relies on Cas9's binding specificity to discriminate SNVs, therefore limits the target SNVs within a protospacer and proximal to (<10 bp) the protospacer adjacent motif (PAM)¹. sgGOLDFISH relies eCas9 nickase's cleavage specificity to discriminate SNVs, hence allows for targeting SNVs distal to PAM. STAR-FISH is based on in situ PCR that produces cloud-like signals which reduces the localization accuracy of target SNVs², whereas in sgGOLDFISH probes directly hybridize to genome and produce well-defined signals. Furthermore, CasPLA and STAR-FISH requires proteinase treatment to detect nuclear SNVs^{1,2}, while sgGOLDFISH does not require proteinase treatment. Zombie is limited to detect SNVs (e.g., SNVs generated by base editor) in pre-integrated DNA barcodes because it requires phage promoters upstream of the target SNV³. In contrast, there is no need to modify the genome of samples for sgGOLDFISH.

| | Nuclear DNA FISH methods | | | | | |
|---|---|---|---|---|---|---|
| | | | | | Conventional | Live cell Cas9 |
| | sgGOLDFISH | CasPLA¹ | STAR-FISH² | Zombie³ | DNA FISH⁴ | imaging⁵ |
| Targeting scope of | PAM-distal | PAM- | 3′ end of a | Pre-integrated | Not SNV | Not SNV |
| nuclear SNV | (Yes) | proximal | PCR primer | DNA barcodes | sensitive | sensitive |
| | PAM-proximal | | | with phage | | |
| | (Possible) | | | promoters | | |
| Labeling efficiency of | Moderate | Moderate | High | High | High | Moderate |
| non-repetitive | | | | | | |
| targets | | | | | | |
| Global DNA | Not Required | Not Required | Required | Not Required | Required | Not Required |
| denaturation | | | | | | |
| Protein | Yes | No | No | Yes | Yes | No |
| immunofluorescence | | | | | | |
| compatible | | | | | | |
| Live cell imaging | No | No | No | No | No | Yes |
| Tissue imaging | Possible | Yes | Yes | Yes | Yes | Possible |

### REFERENCES

[0413] 1. Visscher, P. M. et al. The American Journal of Human Genetics 101, 5-22 (2017).
[0414] 2. Larsson, C., Grundberg, I., Söderberg, O. & Nilsson, M. Nature methods 7, 395-397 (2010).
[0415] 3. Levesque, M. J., Ginart, P., Wei, Y. & Raj, A. Nature methods 10, 865-867 (2013).
[0416] 4. Deng, R. et al. Angewandte Chemie International Edition 53, 2389-2393 (2014).
[0417] 5. Kühnemund, M. et al. Nature Communications 8, 13913 (2017).
[0418] 6. Mellis, I. A., Gupte, R., Raj, A. & Rouhanifard, S. H. Nature methods 14, 801-804 (2017).
[0419] 7. Marras, S. A. E., Bushkin, Y. & Tyagi, S. Proceedings of the National Academy of Sciences 116, 13921-13926 (2019).
[0420] 8. Ke, R. et al. Nature methods 10, 857-860 (2013).
[0421] 9. Larsson, C. et al. Nature methods 1, 227-232 (2004).
[0422] 10. Askary, A. et al. Nature biotechnology 38, 66-75 (2020).
[0423] 11. Zhang, K. et al. J Am Chem Soc 140, 11293-11301 (2018).
[0424] 12. Janiszewska, M. et al. Nature genetics 47, 1212-1219 (2015).
[0425] 13. Jinek, M. et al. Science 337, 816 (2012).
[0426] 14. Wang, Y. et al. Molecular Cell (2021).
[0427] 15. Slaymaker, I. M. et al. Science 351, 84 (2015).
[0428] 16. Okafor, I. C. et al. Nucleic Acids Res 47, 11880-11888 (2019).
[0429] 17. Rose, J. C. et al. Nature methods 14, 891-896 (2017).
[0430] 18. Goldman, R. D. et al. Proceedings of the National Academy of Sciences 101, 8963-8968 (2004).
[0431] 19. Koblan, L. W. et al. Nature 589, 608-614 (2021).
[0432] 20. Mccord, R. P. et al. Genome Research 23, 260-269 (2013).
[0433] 21. Wang, Y. et al. Proceedings of the National Academy of Sciences 118 (2020).
[0434] 22. Rouillard, J. M. Nucleic Acids Research 31, 3057-3062 (2003).
[0435] 23. Gaspar, I., Wippich, F. & Ephrussi, A. RNA (2017).
[0436] 24. Mueller, F. et al. Nature methods 10, 277-278 (2013).

### Example 4: SSB-ddPCR Assay

[0437] Sequencing-based methods have been developed for mapping single-strand breaks (SSBs) or double-strand breaks (DSBs) in cells, but they are expensive and do not provide the absolute value of the fraction of DNA carries the breaks at a target site in the cell population⁶⁻¹⁰. A previously developed droplet digital PCR (ddPCR) assay unbiasedly measures the fraction of DNA with DSBs at a target site, but it is insensitive to SSBs. To quantitatively measure the cleavage efficiency of eCas9 nickase in complex with gMUC4-OneMM or gMUC4-twoMM in fixed cells, the ddPCR assay was modified to make it SSB-sensitive (therefore we call the modified ddPCR assay as SSB-ddPCR assay). The key modification is that the SSB was converted DSB by an additional Cas9 nickase treatment.

[0438] In the Step 1 of the SSB-ddPCR assay, eCas9 nickase with gMUC4-OneMM or gMUC4-TwoMM was applied to fixed and permeabilized HEK293T cells to cleave its target genomic DNA, which would introduce a SSB at one of the DNA strands if cleavage occurs (FIG. 16A, a SSB is introduced at the top strand if cleavage occurs). The cells were then treated with proteinase K and the genomic DNA was harvested. In the Step 2, Cas9 nickase RNP (400 nM) which cleaves the other strand (i.e., different from the scissile strand in Step 1) was mixed with less than 600 ng of the purified genomic DNA (FIG. 16A, a SSB is introduced in the bottom strand in the Step 2). The efficiency of the Cas9 nickase RNP to cleave the bottom strand was found to be around 100% under the experimental conditions herein (FIGS. 17A, 17B). Finally, after removing the Cas9 nickase RNP from the Step 2, the genomic DNA was mixed with two pairs of primers and two probes for ddPCR (FIG. 16A). The F1/R1 primers span the cleavage sites of the eCas9 nickase RNP in the Step 1 and the Cas9 nickase RNP in the Step 2, while the F2/R2 primers do not (FIG. 16A). The F1/R1 and F2/R2 amplicons spaced by 216 base pairs. The amplification of the F1/R1 and F2/R2 amplicons are detected using FAM-quencher probe and HEX-quencher probe, respectively. In the ddPCR reactions, the DNA polymerase digests the probe annealed to template DNA by using its proofreading exonuclease activity, and releases the fluorescent dye from the quencher¹¹. Therefore, a droplet shows FAM fluorescence or HEX fluorescence indicates amplification of the F1/R1 amplicon or the F2/R2 amplicon, respectively (FIG. 16A). Hereinafter droplets with negative FAM signal and positive HEX signal were referred to as “−FAM+HEX droplets” (FIG. 16B green spots), and the droplets with positive FAM signal and positive HEX signal as “+FAM+HEX droplets” (FIG. 16B, orange spots). The fraction of “−FAM+HEX droplet” was calculated by using the number of “−FAM+HEX droplets” divided by the total number of “−FAM+HEX droplets” and “+FAM+HEX droplets” (FIGS. 16B, 16C). When gMUC4-TwoMM, which contains two mismatches against the target, or gMUC4-OneMM, which contains one mismatch, was complexed with eCas9 nickase for the SSB-ddPCR assay in HEK293T cells, we observed the fractions of “−FAM+HEX droplets” were 0.283±0.005 and 0.580±0.010, respectively (FIGS. 16B, 16C).

[0439] Ideally, if there is no cleavage by eCas9 nickase RNP in the Step 1, the input DNA for ddPCR should have only a SSB at the bottom strand within the F1/R1 amplicon, and the ddPCR should generate “+FAM+HEX droplets” because the top strand is intact (FIG. 16A). However, even when catalytically dead Cas9 (dCas9)¹² was used instead of eCas9 nickase in the Step 1, the fractions of −FAM+HEX droplets was 0.294±0.015 (FIG. 17C). Similarly, in the previous study of DSB-ddPCR, about 7% droplets also showed failed amplification of the F1/R1 amplicon and successful amplification of the F2/R2 amplicon even though the input DNA was uncleaved control DNA¹¹. It was speculated that the PCR amplification may fail in a fraction of droplets even though intact template DNA presents in the droplets, resulting in the “background level” of −FAM+HEX droplets.

[0440] To obtain the absolute value of the fraction of DNA cleaved by eCas9 nickase RNP in the Step 1, a standard curve was generated that can convert ddPCR readout (i.e., the fraction of “−FAM+HEX droplets”) into the absolute value of fraction of DNA (FIG. 16C). dCas9 RNP (using gMUC4-OneMM) was applied to fixed and permeabilized cells, and then genomic DNA were harvest (FIG. 18, Step 1). Next, the harvested genomic DNA was split into two tubes (FIG. 18, Step 1). One was treated with restriction enzyme (Msel) to generate “ds-cut genomic DNA”, and the other one was treated with Cas9 nickase RNP which cleaves the bottom strand to generate “ss-nicked genomic DNA” (FIG. 18, Step 2). Finally, “ds-cut genomic DNA” and “ss-nicked genomic DNA” were mixed at different ratios for ddPCR (FIG. 18). The relationship between ddPCR readout and the fraction of “ds-cut genomic DNA” added is linear (FIG. 16C, Pearson's r²>0.99). According to the standard curve, the fraction of DNA cleaved by eCas9 nickase RNP in the Step 1 of the SSB-ddPCR was insignificant (<0.05) for gMUC4-TwoMM and ˜0.4 for gMUC4-OneMM (FIG. 16C), consistent with the in vitro cleavage data using eCas9 RNP (FIG. 15D).

### REFERENCES

[0441] 1. Zhang, K. et al. J Am Chem Soc 140, 11293-11301 (2018).
[0442] 2. Janiszewska, M. et al. Nature genetics 47, 1212-1219 (2015).
[0443] 3. Askary, A. et al. Nature biotechnology 38, 66-75 (2020).
[0444] 4. Levsky, J. M. & Singer, R. H. Journal of cell science 116, 2833-2838 (2003).
[0445] 5. Chen, B. et al. Cell 155, 1479-1491 (2013).
[0446] 6. Lensing, S. V. et al. Nature methods 13, 855-857 (2016).
[0447] 7. Tsai, S. Q. et al. Nature biotechnology 33, 187-197 (2015).
[0448] 8. Wong, N., John, S., Nussenzweig, A. & Canela, A. in Homologous Recombination 9-31 (Springer US, 2021).
[0449] 9. Ran, F. A. et al. Nature 520, 186-191 (2015).
[0450] 10. Wu, W. et al. Nature (2021).
[0451] 11. Rose, J. C. et al. Nature methods 14, 891-896 (2017).
[0452] 12. Jinek, M. et al. Science 337, 816 (2012).

Lengthy table referenced here
US20250277256A1-20250904-T00001
Please refer to the end of the specification for access instructions.

LENGTHY TABLES
The patent application contains a lengthy table section. A copy of the table is available in electronic form from the USPTO web site (https://seqdata.uspto.gov/?pageRequest=docDetail&DocID=US20250277256A1). An electronic copy of the table will also be available from the USPTO upon request and payment of the fee set forth in 37 CFR 1.19(b)(3).

1. A method of detecting a specific nucleic acid sequence in a genome, comprising:
inducing a nick in genomic nucleic acid sequences by a gene editing complex;
denaturing the genomic nucleic acid sequences by contacting the genomic nucleic acid sequences with a helicase enzyme at the nicked genomic nucleic acid sequences;
contacting the denatured genome with a detectably labeled probe, wherein the detectably labeled probe is complementary to the specific nucleic acid sequence of interest; and,
detecting the specific nucleic acid sequence of interest.

2. The method of claim 1, wherein the specific nucleic acid sequence of interest comprises one or more nucleic acid sequences in coding and non-coding nucleic acid sequences of the genome.

3. The method of claim 2, wherein the genomic nucleic acid sequences comprise genomic DNA.

4. The method of claim 1, wherein the nicking of genomic DNA sequences by the gene editing complex produces a 3′ single-stranded nucleic acid overhang.

5. The method of claim 4, wherein the helicase binds to the genomic DNA at the site of the nick and unwinds downstream double stranded genomic DNA.

6. The method of claim 1, wherein the gene editing complex comprises a Clustered Regularly Interspaced Short Palindromic Repeat (CRISPR)-associated endonuclease and at least one guide nucleic acid sequence.

7. The method of claim 1, wherein the gene editing complex comprises at least two guide nucleic acid sequences.

8. The method of claim 1, wherein the one or more guide nucleic acid sequences are RNA.

9. The method of claim 8, wherein the guide RNA (gRNA) sequences comprise at least about 90% sequence identity to one or more target nucleic acid sequences in coding and non-coding nucleic acid sequences of the genome, or complementary sequences thereof.

10. The method of claim 8, wherein the guide RNA (gRNA) sequences are complementary to one or more target nucleic acid sequences in coding and non-coding nucleic acid sequences of the genome, or complementary sequences thereof.

11. The method of claim 8, further comprising one or more guide RNAs having one or more nucleotide mismatches compared to the target nucleic acid sequence, or complementary sequences thereof.

12. The method of claim 11, wherein one or more single-nucleotide mismatches in one or more guide RNAs inhibit nicking of target genomic DNA.

13. The method of claim 1, wherein the guide RNA comprises crRNA and tracrRNA.

14. The method of claim 3, wherein the gene-editing complex comprises CRISPR-associated endonuclease is a Type I, Type II, or Type III Cas endonuclease.

15. The method of claim 6, wherein the CRISPR-associated endonuclease is a Cas9 endonuclease, a Cas12 endonuclease, a CasX endonuclease, a CasΦ endonuclease or variants thereof.

16. The method of claim 15, wherein the CRISPR-associated endonuclease is a Cas9 nuclease or variants thereof.

17. The method of claim 16, wherein the Cas9 nuclease is a Staphylococcus aureus Cas9 nuclease.

18-22. (canceled)

23. A method of detecting mutations in a genome of a cell or tissue, comprising:
inducing a nick in genomic DNA by a gene editing complex;
denaturing the genomic DNA by contacting the genome with a helicase enzyme at the nicked genomic DNA;
contacting the denatured genomic DNA with a detectably labeled probe, wherein the detectably labeled probe is complementary to the specific nucleic acid sequence of interest; and,
detecting the mutations in the genome.

24. The method of claim 23, wherein the specific nucleic acid sequence of interest comprises one or more nucleic acid sequences in coding and non-coding nucleic acid sequences of the genome.

25-45. (canceled)

46. A method of detecting single nucleotide variation (SNV) mutations in a genome of a cell or tissue, comprising:
inducing a nick in genomic DNA by a gene editing complex;
denaturing the genomic DNA by contacting the genome with a helicase enzyme at the nicked genomic DNA;
contacting the denatured genomic DNA with a detectably labeled probe, wherein the detectably labeled probe is complementary to the specific nucleic acid sequence of interest; and,
detecting the mutations in the genome.

47-61. (canceled)

The application's sequence listing, which the Patent Office published only in electronic form, follows.

SEQUENCE LISTING (6136 sequences)

SEQ ID NO: 1 - protein, 6 aa, Artificial Sequence
  Description of Artificial Sequence: Synthetic 6xHis tag
HHHHHH

SEQ ID NO: 2 - DNA, 64 bp, Artificial Sequence
  Description of Artificial Sequence: Synthetic oligonucleotide
caaaacagcatagctctaaaactcttcctgtcaccgacactctatagtgagtcgtattaatttc

SEQ ID NO: 3 - DNA, 60 bp, Artificial Sequence
  Description of Artificial Sequence: Synthetic oligonucleotide
acagcatagctctaaaactccagacatcgccgggctgctatagtgagtcgtattaatttc

SEQ ID NO: 4 - DNA, 60 bp, Artificial Sequence
  Description of Artificial Sequence: Synthetic oligonucleotide
acagcatagctctaaaacccttgtcgcttcccttgctctatagtgagtcgtattaatttc

SEQ ID NO: 5 - DNA, 60 bp, Artificial Sequence
  Description of Artificial Sequence: Synthetic oligonucleotide
acagcatagctctaaaaccaaagactcagacacccagctatagtgagtcgtattaatttc

SEQ ID NO: 6 - DNA, 60 bp, Artificial Sequence
  Description of Artificial Sequence: Synthetic oligonucleotide
acagcatagctctaaaaccttcaccagcatggcttctctatagtgagtcgtattaatttc

SEQ ID NO: 7 - DNA, 60 bp, Artificial Sequence
  Description of Artificial Sequence: Synthetic oligonucleotide
acagcatagctctaaaacccacgtcctcacggtgggactatagtgagtcgtattaatttc

SEQ ID NO: 8 - DNA, 60 bp, Artificial Sequence
  Description of Artificial Sequence: Synthetic oligonucleotide
acagcatagctctaaaacaccgttcaccactgcttttctatagtgagtcgtattaatttc

SEQ ID NO: 9 - DNA, 60 bp, Artificial Sequence
  Description of Artificial Sequence: Synthetic oligonucleotide
acagcatagctctaaaacggtcagatgtgtgggtgccctatagtgagtcgtattaatttc

SEQ ID NO: 10 - DNA, 60 bp, Artificial Sequence
  Description of Artificial Sequence: Synthetic oligonucleotide
acagcatagctctaaaactgtctagcccacctctgtcctatagtgagtcgtattaatttc

SEQ ID NO: 11 - DNA, 60 bp, Artificial Sequence
  Description of Artificial Sequence: Synthetic oligonucleotide
acagcatagctctaaaacggagcacagtggggtttccctatagtgagtcgtattaatttc

SEQ ID NO: 12 - DNA, 60 bp, Artificial Sequence
  Description of Artificial Sequence: Synthetic oligonucleotide
acagcatagctctaaaacatgaagagcctaagactccctatagtgagtcgtattaatttc

SEQ ID NO: 13 - DNA, 60 bp, Artificial Sequence
  Description of Artificial Sequence: Synthetic oligonucleotide
acagcatagctctaaaacggttcaatcaccctccttcctatagtgagtcgtattaatttc

SEQ ID NO: 14 - DNA, 60 bp, Artificial Sequence
  Description of Artificial Sequence: Synthetic oligonucleotide
acagcatagctctaaaactagatgaagggatatgaccctatagtgagtcgtattaatttc

SEQ ID NO: 15 - DNA, 60 bp, Artificial Sequence
  Description of Artificial Sequence: Synthetic oligonucleotide
acagcatagctctaaaacttgcaaacccacaggaagcctatagtgagtcgtattaatttc

SEQ ID NO: 16 - DNA, 60 bp, Artificial Sequence
  Description of Artificial Sequence: Synthetic oligonucleotide
acagcatagctctaaaactcggggtccgttcatgcagctatagtgagtcgtattaatttc

SEQ ID NO: 17 - DNA, 60 bp, Artificial Sequence
  Description of Artificial Sequence: Synthetic oligonucleotide
acagcatagctctaaaacagggcgtggcgggactcacctatagtgagtcgtattaatttc

SEQ ID NO: 18 - DNA, 60 bp, Artificial Sequence
  Description of Artificial Sequence: Synthetic oligonucleotide
acagcatagctctaaaactagcaatgaagacacaaatctatagtgagtcgtattaatttc

SEQ ID NO: 19 - DNA, 60 bp, Artificial Sequence
  Description of Artificial Sequence: Synthetic oligonucleotide
acagcatagctctaaaacgtgctgtgtcctagaacaactatagtgagtcgtattaatttc

SEQ ID NO: 20 - DNA, 60 bp, Artificial Sequence
  Description of Artificial Sequence: Synthetic oligonucleotide
acagcatagctctaaaacagattttagtgccaagagactatagtgagtcgtattaatttc

SEQ ID NO: 21 - DNA, 60 bp, Artificial Sequence
  Description of Artificial Sequence: Synthetic oligonucleotide
acagcatagctctaaaaccatgtgcagttgagaacatctatagtgagtcgtattaatttc

SEQ ID NO: 22 - DNA, 60 bp, Artificial Sequence
  Description of Artificial Sequence: Synthetic oligonucleotide
acagcatagctctaaaacttcgaaatgcagctctcagctatagtgagtcgtattaatttc

SEQ ID NO: 23 - DNA, 60 bp, Artificial Sequence
  Description of Artificial Sequence: Synthetic oligonucleotide
acagcatagctctaaaacccctttatacattacagtgctatagtgagtcgtattaatttc

SEQ ID NO: 24 - DNA, 60 bp, Artificial Sequence
  Description of Artificial Sequence: Synthetic oligonucleotide
acagcatagctctaaaaccaattttaatgctgattcactatagtgagtcgtattaatttc

SEQ ID NO: 25 - DNA, 60 bp, Artificial Sequence
  Description of Artificial Sequence: Synthetic oligonucleotide
acagcatagctctaaaacaatttgggaaataatgactctatagtgagtcgtattaatttc

SEQ ID NO: 26 - DNA, 60 bp, Artificial Sequence
  Description of Artificial Sequence: Synthetic oligonucleotide
acagcatagctctaaaactcgaggtgagtatgagattctatagtgagtcgtattaatttc

SEQ ID NO: 27 - DNA, 60 bp, Artificial Sequence
  Description of Artificial Sequence: Synthetic oligonucleotide
acagcatagctctaaaactatctccttttctatcaccctatagtgagtcgtattaatttc

SEQ ID NO: 28 - DNA, 60 bp, Artificial Sequence
  Description of Artificial Sequence: Synthetic oligonucleotide
acagcatagctctaaaacagtgatataagagaactcactatagtgagtcgtattaatttc

SEQ ID NO: 29 - DNA, 60 bp, Artificial Sequence
  Description of Artificial Sequence: Synthetic oligonucleotide
acagcatagctctaaaacctattggcactcatgtctcctatagtgagtcgtattaatttc

SEQ ID NO: 30 - DNA, 60 bp, Artificial Sequence
  Description of Artificial Sequence: Synthetic oligonucleotide
acagcatagctctaaaactgcataaaggtcataattactatagtgagtcgtattaatttc

SEQ ID NO: 31 - DNA, 60 bp, Artificial Sequence
  Description of Artificial Sequence: Synthetic oligonucleotide
acagcatagctctaaaacgataatctttcttgcactgctatagtgagtcgtattaatttc

SEQ ID NO: 32 - DNA, 60 bp, Artificial Sequence
  Description of Artificial Sequence: Synthetic oligonucleotide
acagcatagctctaaaacatacacaaatgcacaaggactatagtgagtcgtattaatttc

SEQ ID NO: 33 - DNA, 60 bp, Artificial Sequence
  Description of Artificial Sequence: Synthetic oligonucleotide
acagcatagctctaaaactatcaagattgttggtagcctatagtgagtcgtattaatttc

SEQ ID NO: 34 - DNA, 60 bp, Artificial Sequence
  Description of Artificial Sequence: Synthetic oligonucleotide
acagcatagctctaaaacaccacatcttcataacatcctatagtgagtcgtattaatttc

SEQ ID NO: 35 - DNA, 60 bp, Artificial Sequence
  Description of Artificial Sequence: Synthetic oligonucleotide
acagcatagctctaaaacgtaaatataatgctagctactatagtgagtcgtattaatttc

SEQ ID NO: 36 - DNA, 60 bp, Artificial Sequence
  Description of Artificial Sequence: Synthetic oligonucleotide
acagcatagctctaaaaccagttttctattcaaattactatagtgagtcgtattaatttc

SEQ ID NO: 37 - DNA, 60 bp, Artificial Sequence
  Description of Artificial Sequence: Synthetic oligonucleotide
acagcatagctctaaaacggtacttacagaattaattctatagtgagtcgtattaatttc

SEQ ID NO: 38 - DNA, 60 bp, Artificial Sequence
  Description of Artificial Sequence: Synthetic oligonucleotide
acagcatagctctaaaacatatgcccaatatctaatgctatagtgagtcgtattaatttc

SEQ ID NO: 39 - DNA, 60 bp, Artificial Sequence
  Description of Artificial Sequence: Synthetic oligonucleotide
acagcatagctctaaaactctaaatgttcaatgaatgctatagtgagtcgtattaatttc

SEQ ID NO: 40 - DNA, 60 bp, Artificial Sequence
  Description of Artificial Sequence: Synthetic oligonucleotide
acagcatagctctaaaacaacctgtatgctgaaaaatctatagtgagtcgtattaatttc

SEQ ID NO: 41 - DNA, 60 bp, Artificial Sequence
  Description of Artificial Sequence: Synthetic oligonucleotide
acagcatagctctaaaacgtgtagcaaatggaagcatctatagtgagtcgtattaatttc

SEQ ID NO: 42 - DNA, 60 bp, Artificial Sequence
  Description of Artificial Sequence: Synthetic oligonucleotide
acagcatagctctaaaacaaatttataaagaatgtacctatagtgagtcgtattaatttc

SEQ ID NO: 43 - DNA, 60 bp, Artificial Sequence
  Description of Artificial Sequence: Synthetic oligonucleotide
acagcatagctctaaaacgtccgtgattgtgattactctatagtgagtcgtattaatttc

SEQ ID NO: 44 - DNA, 60 bp, Artificial Sequence
  Description of Artificial Sequence: Synthetic oligonucleotide
acagcatagctctaaaactagcaaggacttcctaattctatagtgagtcgtattaatttc

SEQ ID NO: 45 - DNA, 60 bp, Artificial Sequence
  Description of Artificial Sequence: Synthetic oligonucleotide
acagcatagctctaaaactttcattttaagaaacagtctatagtgagtcgtattaatttc

SEQ ID NO: 46 - DNA, 60 bp, Artificial Sequence
  Description of Artificial Sequence: Synthetic oligonucleotide
acagcatagctctaaaacctaatattctcagtcattactatagtgagtcgtattaatttc

SEQ ID NO: 47 - DNA, 60 bp, Artificial Sequence
  Description of Artificial Sequence: Synthetic oligonucleotide
acagcatagctctaaaactctacaatatgctagtttgctatagtgagtcgtattaatttc

SEQ ID NO: 48 - DNA, 60 bp, Artificial Sequence
  Description of Artificial Sequence: Synthetic oligonucleotide
acagcatagctctaaaacggttttctttagcatagtgctatagtgagtcgtattaatttc

SEQ ID NO: 49 - DNA, 60 bp, Artificial Sequence
  Description of Artificial Sequence: Synthetic oligonucleotide
acagcatagctctaaaaccatgaattattatttctttctatagtgagtcgtattaatttc

SEQ ID NO: 50 - DNA, 70 bp, Artificial Sequence
  Description of Artificial Sequence: Synthetic oligonucleotide
acagcatagctctaaaactcttgacctaatcacctccctattcatccctatagtgagtcgtattaatttc

SEQ ID NO: 51 - DNA, 70 bp, Artificial Sequence
  Description of Artificial Sequence: Synthetic oligonucleotide
acagcatagctctaaaactagtatctcatccttggccctattcatccctatagtgagtcgtattaatttc

SEQ ID NO: 52 - DNA, 70 bp, Artificial Sequence
  Description of Artificial Sequence: Synthetic oligonucleotide
acagcatagctctaaaacgcatctcatctaaatatccttattcatccctatagtgagtcgtattaatttc

SEQ ID NO: 53 - DNA, 70 bp, Artificial Sequence
  Description of Artificial Sequence: Synthetic oligonucleotide
acagcatagctctaaaacaactacaatggtgtggcaagtattcatccctatagtgagtcgtattaatttc

SEQ ID NO: 54 - DNA, 70 bp, Artificial Sequence
  Description of Artificial Sequence: Synthetic oligonucleotide
acagcatagctctaaaacacacccatcagggcaaacaatattcatccctatagtgagtcgtattaatttc

SEQ ID NO: 55 - DNA, 70 bp, Artificial Sequence
  Description of Artificial Sequence: Synthetic oligonucleotide
acagcatagctctaaaaccaaggttctaggtggccctatattcatccctatagtgagtcgtattaatttc

SEQ ID NO: 56 - DNA, 70 bp, Artificial Sequence
  Description of Artificial Sequence: Synthetic oligonucleotide
acagcatagctctaaaacaatggctctactaagcattgtattcatccctatagtgagtcgtattaatttc

SEQ ID NO: 57 - DNA, 70 bp, Artificial Sequence
  Description of Artificial Sequence: Synthetic oligonucleotide
acagcatagctctaaaactgcactctgtgagcctgcaatattcatccctatagtgagtcgtattaatttc

SEQ ID NO: 58 - DNA, 70 bp, Artificial Sequence
  Description of Artificial Sequence: Synthetic oligonucleotide
acagcatagctctaaaaccagatggggcagccaagtagtattcatccctatagtgagtcgtattaatttc

SEQ ID NO: 59 - DNA, 70 bp, Artificial Sequence
  Description of Artificial Sequence: Synthetic oligonucleotide
acagcatagctctaaaacttgagatcattcttccatgttattcatccctatagtgagtcgtattaatttc

SEQ ID NO: 60 - DNA, 70 bp, Artificial Sequence
  Description of Artificial Sequence: Synthetic oligonucleotide
acagcatagctctaaaactgtgattacaaattccaacttattcatccctatagtgagtcgtattaatttc

SEQ ID NO: 61 - DNA, 70 bp, Artificial Sequence
  Description of Artificial Sequence: Synthetic oligonucleotide
acagcatagctctaaaaccatcagaatatcctttaccatattcatccctatagtgagtcgtattaatttc

SEQ ID NO: 62 - DNA, 70 bp, Artificial Sequence
  Description of Artificial Sequence: Synthetic oligonucleotide
acagcatagctctaaaaccattgaaattgccctttatgtattcatccctatagtgagtcgtattaatttc

SEQ ID NO: 63 - DNA, 70 bp, Artificial Sequence
  Description of Artificial Sequence: Synthetic oligonucleotide
acagcatagctctaaaacttccatgtttataaggtatttattcatccctatagtgagtcgtattaatttc

SEQ ID NO: 64 - DNA, 70 bp, Artificial Sequence
  Description of Artificial Sequence: Synthetic oligonucleotide
acagcatagctctaaaacgcagattcaatgtctggtgatattcatccctatagtgagtcgtattaatttc

SEQ ID NO: 65 - DNA, 70 bp, Artificial Sequence
  Description of Artificial Sequence: Synthetic oligonucleotide
acagcatagctctaaaacttcatgagggctttgccttctattcatccctatagtgagtcgtattaatttc

SEQ ID NO: 66 - DNA, 70 bp, Artificial Sequence
  Description of Artificial Sequence: Synthetic oligonucleotide
acagcatagctctaaaacgaacttatttatcttgtgtatattcatccctatagtgagtcgtattaatttc

SEQ ID NO: 67 - DNA, 70 bp, Artificial Sequence
  Description of Artificial Sequence: Synthetic oligonucleotide
acagcatagctctaaaactatcttggttattgtgaacatattcatccctatagtgagtcgtattaatttc

SEQ ID NO: 68 - DNA, 70 bp, Artificial Sequence
  Description of Artificial Sequence: Synthetic oligonucleotide
acagcatagctctaaaacccaggatggctaaatagtagtattcatccctatagtgagtcgtattaatttc

SEQ ID NO: 69 - DNA, 70 bp, Artificial Sequence
  Description of Artificial Sequence: Synthetic oligonucleotide
acagcatagctctaaaacgtatcacacaattaggtcattattcatccctatagtgagtcgtattaatttc

SEQ ID NO: 70 - DNA, 70 bp, Artificial Sequence
  Description of Artificial Sequence: Synthetic oligonucleotide
acagcatagctctaaaacttgtgaccagaaattgtatttattcatccctatagtgagtcgtattaatttc

SEQ ID NO: 71 - DNA, 70 bp, Artificial Sequence
  Description of Artificial Sequence: Synthetic oligonucleotide
acagcatagctctaaaaccaatgtttggtgtacatttatattcatccctatagtgagtcgtattaatttc

SEQ ID NO: 72 - DNA, 70 bp, Artificial Sequence
  Description of Artificial Sequence: Synthetic oligonucleotide
acagcatagctctaaaacgtagcatctgcatctgtttatattcatccctatagtgagtcgtattaatttc

SEQ ID NO: 73 - DNA, 70 bp, Artificial Sequence
  Description of Artificial Sequence: Synthetic oligonucleotide
acagcatagctctaaaaccactgtggtgggtggaatgatattcatccctatagtgagtcgtattaatttc

SEQ ID NO: 74 - DNA, 70 bp, Artificial Sequence
  Description of Artificial Sequence: Synthetic oligonucleotide
acagcatagctctaaaactggtagaaattacaggctgatattcatccctatagtgagtcgtattaatttc

SEQ ID NO: 75 - DNA, 70 bp, Artificial Sequence
  Description of Artificial Sequence: Synthetic oligonucleotide
acagcatagctctaaaacttgatgctagaacgtctccatattcatccctatagtgagtcgtattaatttc

SEQ ID NO: 76 - DNA, 70 bp, Artificial Sequence
  Description of Artificial Sequence: Synthetic oligonucleotide
acagcatagctctaaaactcctgctgatgtcattctcctattcatccctatagtgagtcgtattaatttc

SEQ ID NO: 77 - DNA, 70 bp, Artificial Sequence
  Description of Artificial Sequence: Synthetic oligonucleotide
acagcatagctctaaaacaagcacaaacattcgcaaagtattcatccctatagtgagtcgtattaatttc

SEQ ID NO: 78 - DNA, 70 bp, Artificial Sequence
  Description of Artificial Sequence: Synthetic oligonucleotide
acagcatagctctaaaacctttctgataatttatcgtctattcatccctatagtgagtcgtattaatttc

SEQ ID NO: 79 - DNA, 70 bp, Artificial Sequence
  Description of Artificial Sequence: Synthetic oligonucleotide
acagcatagctctaaaactagggagaaggtataacgattattcatccctatagtgagtcgtattaatttc

SEQ ID NO: 80 - DNA, 70 bp, Artificial Sequence
  Description of Artificial Sequence: Synthetic oligonucleotide
acagcatagctctaaaacgacttttctttgactacaattattcatccctatagtgagtcgtattaatttc

SEQ ID NO: 81 - DNA, 70 bp, Artificial Sequence
  Description of Artificial Sequence: Synthetic oligonucleotide
acagcatagctctaaaacggtactgtacttggcactggtattcatccctatagtgagtcgtattaatttc

SEQ ID NO: 82 - DNA, 70 bp, Artificial Sequence
  Description of Artificial Sequence: Synthetic oligonucleotide
acagcatagctctaaaacaagtcacatctactctgacttattcatccctatagtgagtcgtattaatttc

SEQ ID NO: 83 - DNA, 70 bp, Artificial Sequence
  Description of Artificial Sequence: Synthetic oligonucleotide
acagcatagctctaaaacgagataaaattgcttaaagttattcatccctatagtgagtcgtattaatttc

SEQ ID NO: 84 - DNA, 70 bp, Artificial Sequence
  Description of Artificial Sequence: Synthetic oligonucleotide
acagcatagctctaaaactctggaaaaatcatgctatttattcatccctatagtgagtcgtattaatttc

SEQ ID NO: 85 - DNA, 70 bp, Artificial Sequence
  Description of Artificial Sequence: Synthetic oligonucleotide
acagcatagctctaaaacaagcactggcattcttaatctattcatccctatagtgagtcgtattaatttc

SEQ ID NO: 86 - DNA, 70 bp, Artificial Sequence
  Description of Artificial Sequence: Synthetic oligonucleotide
acagcatagctctaaaacgatcaagtgaaagggttctttattcatccctatagtgagtcgtattaatttc

SEQ ID NO: 87 - DNA, 70 bp, Artificial Sequence
  Description of Artificial Sequence: Synthetic oligonucleotide
acagcatagctctaaaacccataggtgcactgcttgtttattcatccctatagtgagtcgtattaatttc

SEQ ID NO: 88 - DNA, 70 bp, Artificial Sequence
  Description of Artificial Sequence: Synthetic oligonucleotide
acagcatagctctaaaacggtgggtctcgggactggcatattcatccctatagtgagtcgtattaatttc

SEQ ID NO: 89 - DNA, 70 bp, Artificial Sequence
  Description of Artificial Sequence: Synthetic oligonucleotide
acagcatagctctaaaaccattcatagggctcgtcagttattcatccctatagtgagtcgtattaatttc

SEQ ID NO: 90 - DNA, 70 bp, Artificial Sequence
  Description of Artificial Sequence: Synthetic oligonucleotide
acagcatagctctaaaacgcgtctgcaatttgacaaactattcatccctatagtgagtcgtattaatttc

SEQ ID NO: 91 - DNA, 70 bp, Artificial Sequence
  Description of Artificial Sequence: Synthetic oligonucleotide
acagcatagctctaaaacctctgtatctcagtttcttctattcatccctatagtgagtcgtattaatttc

SEQ ID NO: 92 - DNA, 70 bp, Artificial Sequence
  Description of Artificial Sequence: Synthetic oligonucleotide
acagcatagctctaaaaccagtacttggagatcttgggtattcatccctatagtgagtcgtattaatttc

SEQ ID NO: 93 - DNA, 70 bp, Artificial Sequence
  Description of Artificial Sequence: Synthetic oligonucleotide
acagcatagctctaaaacctgcagtgggacctgcctcatattcatccctatagtgagtcgtattaatttc

SEQ ID NO: 94 - DNA, 70 bp, Artificial Sequence
  Description of Artificial Sequence: Synthetic oligonucleotide
acagcatagctctaaaacagagaaggtttcaatgacggtattcatccctatagtgagtcgtattaatttc

SEQ ID NO: 95 - DNA, 70 bp, Artificial Sequence
  Description of Artificial Sequence: Synthetic oligonucleotide
acagcatagctctaaaacgggccagcaaatagttacattattcatccctatagtgagtcgtattaatttc

SEQ ID NO: 96 - DNA, 70 bp, Artificial Sequence
  Description of Artificial Sequence: Synthetic oligonucleotide
acagcatagctctaaaaccatcactcactagctgtgtatattcatccctatagtgagtcgtattaatttc

SEQ ID NO: 97 - DNA, 70 bp, Artificial Sequence
  Description of Artificial Sequence: Synthetic oligonucleotide
acagcatagctctaaaactctttgagtcccaccaccactattcatccctatagtgagtcgtattaatttc

SEQ ID NO: 98 - DNA, 70 bp, Artificial Sequence
  Description of Artificial Sequence: Synthetic oligonucleotide
acagcatagctctaaaacctggatcaagacccctcctttattcatccctatagtgagtcgtattaatttc

SEQ ID NO: 99 - DNA, 70 bp, Artificial Sequence
  Description of Artificial Sequence: Synthetic oligonucleotide
acagcatagctctaaaacgagagcggttggtgtctatctattcatccctatagtgagtcgtattaatttc

SEQ ID NO: 100 - DNA, 70 bp, Artificial Sequence
  Description of Artificial Sequence: Synthetic oligonucleotide
acagcatagctctaaaaccagagatgaagaggcacaggtattcatccctatagtgagtcgtattaatttc

SEQ ID NO: 101 - DNA, 70 bp, Artificial Sequence
  Description of Artificial Sequence: Synthetic oligonucleotide
acagcatagctctaaaacgagacaggcagtgagagagatattcatccctatagtgagtcgtattaatttc

SEQ ID NO: 102 - DNA, 70 bp, Artificial Sequence
  Description of Artificial Sequence: Synthetic oligonucleotide
acagcatagctctaaaacaagcctgttatcccaccccttattcatccctatagtgagtcgtattaatttc

SEQ ID NO: 103 - DNA, 70 bp, Artificial Sequence
  Description of Artificial Sequence: Synthetic oligonucleotide
acagcatagctctaaaactgcagccggcagcacactgctattcatccctatagtgagtcgtattaatttc

SEQ ID NO: 104 - DNA, 70 bp, Artificial Sequence
  Description of Artificial Sequence: Synthetic oligonucleotide
acagcatagctctaaaacctgtggttgaagtggaggcatattcatccctatagtgagtcgtattaatttc

SEQ ID NO: 105 - DNA, 70 bp, Artificial Sequence
  Description of Artificial Sequence: Synthetic oligonucleotide
acagcatagctctaaaaccatatgctcccatttacagatattcatccctatagtgagtcgtattaatttc

SEQ ID NO: 106 - DNA, 70 bp, Artificial Sequence
  Description of Artificial Sequence: Synthetic oligonucleotide
acagcatagctctaaaacctccctaacacagtcagccatattcatccctatagtgagtcgtattaatttc

SEQ ID NO: 107 - DNA, 70 bp, Artificial Sequence
  Description of Artificial Sequence: Synthetic oligonucleotide
acagcatagctctaaaaccgcatcagcacctgacatcctattcatccctatagtgagtcgtattaatttc

SEQ ID NO: 108 - DNA, 70 bp, Artificial Sequence
  Description of Artificial Sequence: Synthetic oligonucleotide
acagcatagctctaaaaccttggttgtgcagggggcagtattcatccctatagtgagtcgtattaatttc

SEQ ID NO: 109 - DNA, 70 bp, Artificial Sequence
  Description of Artificial Sequence: Synthetic oligonucleotide
acagcatagctctaaaacggggtagagagtagaaggcatattcatccctatagtgagtcgtattaatttc

SEQ ID NO: 110 - DNA, 70 bp, Artificial Sequence
  Description of Artificial Sequence: Synthetic oligonucleotide
acagcatagctctaaaaccacctctcgcaagtgctccatattcatccctatagtgagtcgtattaatttc

SEQ ID NO: 111 - DNA, 70 bp, Artificial Sequence
  Description of Artificial Sequence: Synthetic oligonucleotide
acagcatagctctaaaaccatctggatcctcaggactctattcatccctatagtgagtcgtattaatttc

SEQ ID NO: 112 - DNA, 70 bp, Artificial Sequence
  Description of Artificial Sequence: Synthetic oligonucleotide
acagcatagctctaaaactggggcaaccaccgttctgatattcatccctatagtgagtcgtattaatttc

SEQ ID NO: 113 - DNA, 70 bp, Artificial Sequence
  Description of Artificial Sequence: Synthetic oligonucleotide
acagcatagctctaaaacctgcactccagcctgctgactattcatccctatagtgagtcgtattaatttc

SEQ ID NO: 114 - DNA, 70 bp, Artificial Sequence
  Description of Artificial Sequence: Synthetic oligonucleotide
acagcatagctctaaaactggccccctctggaaaggggtattcatccctatagtgagtcgtattaatttc

SEQ ID NO: 115 - DNA, 70 bp, Artificial Sequence
  Description of Artificial Sequence: Synthetic oligonucleotide
acagcatagctctaaaacgctctgcagctattgaaagatattcatccctatagtgagtcgtattaatttc

SEQ ID NO: 116 - DNA, 70 bp, Artificial Sequence
  Description of Artificial Sequence: Synthetic oligonucleotide
acagcatagctctaaaacggcgataaagcgagactctgtattcatccctatagtgagtcgtattaatttc

SEQ ID NO: 117 - DNA, 70 bp, Artificial Sequence
  Description of Artificial Sequence: Synthetic oligonucleotide
acagcatagctctaaaacccatgaatgccttcactcaatattcatccctatagtgagtcgtattaatttc

SEQ ID NO: 118 - DNA, 70 bp, Artificial Sequence
  Description of Artificial Sequence: Synthetic oligonucleotide
acagcatagctctaaaacgtgatctcttccagagtctctattcatccctatagtgagtcgtattaatttc

SEQ ID NO: 119 - DNA, 70 bp, Artificial Sequence
  Description of Artificial Sequence: Synthetic oligonucleotide
acagcatagctctaaaaccctctttctcagtgctcacttattcatccctatagtgagtcgtattaatttc

SEQ ID NO: 120 - DNA, 70 bp, Artificial Sequence
  Description of Artificial Sequence: Synthetic oligonucleotide
acagcatagctctaaaacctatgggagaaaggtgggcatattcatccctatagtgagtcgtattaatttc

SEQ ID NO: 121 - DNA, 70 bp, Artificial Sequence
  Description of Artificial Sequence: Synthetic oligonucleotide
acagcatagctctaaaaccaccactgctggcaggattctattcatccctatagtgagtcgtattaatttc

SEQ ID NO: 122 - DNA, 70 bp, Artificial Sequence
  Description of Artificial Sequence: Synthetic oligonucleotide
acagcatagctctaaaacgacagacaaagcaaggcttgtattcatccctatagtgagtcgtattaatttc

SEQ ID NO: 123 - DNA, 70 bp, Artificial Sequence
  Description of Artificial Sequence: Synthetic oligonucleotide
acagcatagctctaaaactgcttgctgccaacttccactattcatccctatagtgagtcgtattaatttc

SEQ ID NO: 124 - DNA, 70 bp, Artificial Sequence
  Description of Artificial Sequence: Synthetic oligonucleotide
acagcatagctctaaaaccctgggtccccagccaagagtattcatccctatagtgagtcgtattaatttc

SEQ ID NO: 125 - DNA, 70 bp, Artificial Sequence
  Description of Artificial Sequence: Synthetic oligonucleotide
acagcatagctctaaaacggtatacctgcaccctggcatattcatccctatagtgagtcgtattaatttc

SEQ ID NO: 126 - DNA, 70 bp, Artificial Sequence
  Description of Artificial Sequence: Synthetic oligonucleotide
acagcatagctctaaaacttgacctccgtcccacatcttattcatccctatagtgagtcgtattaatttc

SEQ ID NO: 127 - DNA, 70 bp, Artificial Sequence
  Description of Artificial Sequence: Synthetic oligonucleotide
acagcatagctctaaaacgggatctggaacccacaccctattcatccctatagtgagtcgtattaatttc

SEQ ID NO: 128 - DNA, 70 bp, Artificial Sequence
  Description of Artificial Sequence: Synthetic oligonucleotide
acagcatagctctaaaaccctcaggagaatcccagtactattcatccctatagtgagtcgtattaatttc

SEQ ID NO: 129 - DNA, 70 bp, Artificial Sequence
  Description of Artificial Sequence: Synthetic oligonucleotide
acagcatagctctaaaactgggtatggaggggagggagtattcatccctatagtgagtcgtattaatttc

SEQ ID NO: 130 - DNA, 70 bp, Artificial Sequence
  Description of Artificial Sequence: Synthetic oligonucleotide
acagcatagctctaaaaccaactgaggcgggactcggctattcatccctatagtgagtcgtattaatttc

SEQ ID NO: 131 - DNA, 70 bp, Artificial Sequence
  Description of Artificial Sequence: Synthetic oligonucleotide
acagcatagctctaaaacgagcacagacctgcccgtggtattcatccctatagtgagtcgtattaatttc

SEQ ID NO: 132 - DNA, 70 bp, Artificial Sequence
  Description of Artificial Sequence: Synthetic oligonucleotide
acagcatagctctaaaacctcagaattcaagcccctcctattcatccctatagtgagtcgtattaatttc

SEQ ID NO: 133 - DNA, 70 bp, Artificial Sequence
  Description of Artificial Sequence: Synthetic oligonucleotide
acagcatagctctaaaactgtccagcctttccctcccttattcatccctatagtgagtcgtattaatttc

SEQ ID NO: 134 - DNA, 70 bp, Artificial Sequence
  Description of Artificial Sequence: Synthetic oligonucleotide
acagcatagctctaaaaccactgccctccccacaaaggtattcatccctatagtgagtcgtattaatttc

SEQ ID NO: 135 - DNA, 70 bp, Artificial Sequence
  Description of Artificial Sequence: Synthetic oligonucleotide
acagcatagctctaaaactaagcgaagggttccaggcttattcatccctatagtgagtcgtattaatttc

SEQ ID NO: 136 - DNA, 70 bp, Artificial Sequence
  Description of Artificial Sequence: Synthetic oligonucleotide
acagcatagctctaaaacgacacacaatcactcacaggtattcatccctatagtgagtcgtattaatttc

SEQ ID NO: 137 - DNA, 70 bp, Artificial Sequence
  Description of Artificial Sequence: Synthetic oligonucleotide
acagcatagctctaaaactgggactggctctgagcagctattcatccctatagtgagtcgtattaatttc

SEQ ID NO: 138 - DNA, 70 bp, Artificial Sequence
  Description of Artificial Sequence: Synthetic oligonucleotide
acagcatagctctaaaaccatgagcacagctgtggccctattcatccctatagtgagtcgtattaatttc

SEQ ID NO: 139 - DNA, 70 bp, Artificial Sequence
  Description of Artificial Sequence: Synthetic oligonucleotide
acagcatagctctaaaaccgtccacccccagcctgacatattcatccctatagtgagtcgtattaatttc

SEQ ID NO: 140 - DNA, 70 bp, Artificial Sequence
  Description of Artificial Sequence: Synthetic oligonucleotide
acagcatagctctaaaacggtgcgctttgcgcaccttctattcatccctatagtgagtcgtattaatttc

SEQ ID NO: 141 - DNA, 70 bp, Artificial Sequence
  Description of Artificial Sequence: Synthetic oligonucleotide
acagcatagctctaaaacgggagctccttgggaagaggtattcatccctatagtgagtcgtattaatttc

SEQ ID NO: 142 - DNA, 70 bp, Artificial Sequence
  Description of Artificial Sequence: Synthetic oligonucleotide
acagcatagctctaaaaccagtcttaatgatgcacttgtattcatccctatagtgagtcgtattaatttc

SEQ ID NO: 143 - DNA, 70 bp, Artificial Sequence
  Description of Artificial Sequence: Synthetic oligonucleotide
acagcatagctctaaaacaggacacaggggcagtgccttattcatccctatagtgagtcgtattaatttc

SEQ ID NO: 144 - DNA, 70 bp, Artificial Sequence
  Description of Artificial Sequence: Synthetic oligonucleotide
acagcatagctctaaaacgcacatctggctgctaggtgtattcatccctatagtgagtcgtattaatttc

SEQ ID NO: 145 - DNA, 70 bp, Artificial Sequence
  Description of Artificial Sequence: Synthetic oligonucleotide
acagcatagctctaaaacaggtgaatctttttagtttttattcatccctatagtgagtcgtattaatttc

SEQ ID NO: 146 - DNA, 70 bp, Artificial Sequence
  Description of Artificial Sequence: Synthetic oligonucleotide
acagcatagctctaaaacaggttccccaccctggaggttattcatccctatagtgagtcgtattaatttc

SEQ ID NO: 147 - DNA, 70 bp, Artificial Sequence
  Description of Artificial Sequence: Synthetic oligonucleotide
acagcatagctctaaaacggatgaggtacacaacaagctattcatccctatagtgagtcgtattaatttc

SEQ ID NO: 148 - DNA, 70 bp, Artificial Sequence
  Description of Artificial Sequence: Synthetic oligonucleotide
acagcatagctctaaaacggtcatcctgcctacatgcatattcatccctatagtgagtcgtattaatttc

SEQ ID NO: 149 - DNA, 70 bp, Artificial Sequence
  Description of Artificial Sequence: Synthetic oligonucleotide
acagcatagctctaaaaccaggatctgggtgcagaggatattcatccctatagtgagtcgtattaatttc

SEQ ID NO: 150 - DNA, 70 bp, Artificial Sequence
  Description of Artificial Sequence: Synthetic oligonucleotide
acagcatagctctaaaactctccgcatcatccatctcctattcatccctatagtgagtcgtattaatttc

SEQ ID NO: 151 - DNA, 70 bp, Artificial Sequence
  Description of Artificial Sequence: Synthetic oligonucleotide
acagcatagctctaaaactgctgtgtagttgcagaccatattcatccctatagtgagtcgtattaatttc

SEQ ID NO: 152 - DNA, 70 bp, Artificial Sequence
  Description of Artificial Sequence: Synthetic oligonucleotide
acagcatagctctaaaaccccccactgtacagaaacggtattcatccctatagtgagtcgtattaatttc

SEQ ID NO: 153 - DNA, 70 bp, Artificial Sequence
  Description of Artificial Sequence: Synthetic oligonucleotide
acagcatagctctaaaaccaagcagggagagggttccctattcatccctatagtgagtcgtattaatttc

SEQ ID NO: 154 - DNA, 70 bp, Artificial Sequence
  Description of Artificial Sequence: Synthetic oligonucleotide
acagcatagctctaaaacccccacacagggcagggcattattcatccctatagtgagtcgtattaatttc

SEQ ID NO: 155 - DNA, 60 bp, Artificial Sequence
  Description of Artificial Sequence: Synthetic oligonucleotide
acagcatagctctaaaacttctttgatagttcaggttctatagtgagtcgtattaatttc

SEQ ID NO: 156 - DNA, 60 bp, Artificial Sequence
  Description of Artificial Sequence: Synthetic oligonucleotide
acagcatagctctaaaactagtaaaggaaataacttcctatagtgagtcgtattaatttc

SEQ ID NO: 157 - DNA, 25 bp, Artificial Sequence
  Description of Artificial Sequence: Synthetic oligonucleotide
gtggcgtgacctgtggatgctgagg

SEQ ID NO: 158 - DNA, 18 bp, Artificial Sequence
  Description of Artificial Sequence: Synthetic oligonucleotide
tcgtagccccggcattgg

SEQ ID NO: 159 - DNA, 18 bp, Artificial Sequence
  Description of Artificial Sequence: Synthetic oligonucleotide
tcctgccctgcctctcag

SEQ ID NO: 160 - DNA, 18 bp, Artificial Sequence
  Description of Artificial Sequence: Synthetic oligonucleotide
aaccccgctccagtgctc

SEQ ID NO: 161 - DNA, 18 bp, Artificial Sequence
  Description of Artificial Sequence: Synthetic oligonucleotide
gactcccagagcgaggct

SEQ ID NO: 162 - DNA, 18 bp, Artificial Sequence
  Description of Artificial Sequence: Synthetic oligonucleotide
cgcagaggggcaagacct

SEQ ID NO: 163 - DNA, 18 bp, Artificial Sequence
  Description of Artificial Sequence: Synthetic oligonucleotide
cagtcaccaagggcgggt

SEQ ID NO: 164 - DNA, 18 bp, Artificial Sequence
  Description of Artificial Sequence: Synthetic oligonucleotide
ctggaggactggcagcca

SEQ ID NO: 165 - DNA, 18 bp, Artificial Sequence
  Description of Artificial Sequence: Synthetic oligonucleotide
ggagctgccgcaatgagg

SEQ ID NO: 166 - DNA, 18 bp, Artificial Sequence
  Description of Artificial Sequence: Synthetic oligonucleotide
ctggccgtcctggttcca

SEQ ID NO: 167 - DNA, 18 bp, Artificial Sequence
  Description of Artificial Sequence: Synthetic oligonucleotide
ggctggagcaagtgcagg

SEQ ID NO: 168 - DNA, 18 bp, Artificial Sequence
  Description of Artificial Sequence: Synthetic oligonucleotide
agcgcactccacggggaa

SEQ ID NO: 169 - DNA, 18 bp, Artificial Sequence
  Description of Artificial Sequence: Synthetic oligonucleotide
agacccctctgcccctct

SEQ ID NO: 170 - DNA, 19 bp, Artificial Sequence
  Description of Artificial Sequence: Synthetic oligonucleotide
ccctacacctccccaccct

SEQ ID NO: 171 - DNA, 19 bp, Artificial Sequence
  Description of Artificial Sequence: Synthetic oligonucleotide
gatggtcgtggctgggaga

SEQ ID NO: 172 - DNA, 20 bp, Artificial Sequence
  Description of Artificial Sequence: Synthetic oligonucleotide
cgagacaggtgagacgcaga

SEQ ID NO: 173 - DNA, 20 bp, Artificial Sequence
  Description of Artificial Sequence: Synthetic oligonucleotide
ggccaagtctttgccgtgaa

SEQ ID NO: 174 - DNA, 20 bp, Artificial Sequence
  Description of Artificial Sequence: Synthetic oligonucleotide
ggactgttggtgtgcaaggg

SEQ ID NO: 175 - DNA, 20 bp, Artificial Sequence
  Description of Artificial Sequence: Synthetic oligonucleotide
cgtggagcgctgagtccttt

SEQ ID NO: 176 - DNA, 20 bp, Artificial Sequence
  Description of Artificial Sequence: Synthetic oligonucleotide
aggctgggtcacactgaagc

SEQ ID NO: 177 - DNA, 21 bp, Artificial Sequence
  Description of Artificial Sequence: Synthetic oligonucleotide
gctgggtgatggagacggaag

SEQ ID NO: 178 - DNA, 21 bp, Artificial Sequence
  Description of Artificial Sequence: Synthetic oligonucleotide
agaagatcgggagacagcagc

SEQ ID NO: 179 - DNA, 21 bp, Artificial Sequence
  Description of Artificial Sequence: Synthetic oligonucleotide
cccttccacctcgggatgttt

SEQ ID NO: 180 - DNA, 23 bp, Artificial Sequence
  Description of Artificial Sequence: Synthetic oligonucleotide
agctcgggtttaaaagcctccat

SEQ ID NO: 181 - DNA, 24 bp, Artificial Sequence
  Description of Artificial Sequence: Synthetic oligonucleotide
catgaactggcagatacgggacaa

SEQ ID NO: 182 - DNA, 24 bp, Artificial Sequence
  Description of Artificial Sequence: Synthetic oligonucleotide
gagagaaaagagaacagagggcca

SEQ ID NO: 183 - DNA, 24 bp, Artificial Sequence
  Description of Artificial Sequence: Synthetic oligonucleotide
gaaatttggtgtctactggtcgcc

SEQ ID NO: 184 - DNA, 25 bp, Artificial Sequence
  Description of Artificial Sequence: Synthetic oligonucleotide
atgccaggcctgtgggagatgttcc

SEQ ID NO: 185 - DNA, 25 bp, Artificial Sequence
  Description of Artificial Sequence: Synthetic oligonucleotide
gtccctctggcttcaggaccaagtt

SEQ ID NO: 186 - DNA, 25 bp, Artificial Sequence
  Description of Artificial Sequence: Synthetic oligonucleotide
atttcttgggcgcatatttgaggag

SEQ ID NO: 187 - DNA, 25 bp, Artificial Sequence
  Description of Artificial Sequence: Synthetic oligonucleotide
acctgcctatacttgagtctagggt

SEQ ID NO: 188 - DNA, 25 bp, Artificial Sequence
  Description of Artificial Sequence: Synthetic oligonucleotide
caagggttaaaggataaggcacagc

SEQ ID NO: 189 - DNA, 26 bp, Artificial Sequence
  Description of Artificial Sequence: Synthetic oligonucleotide
aggaacagagtcaaggagaaagatgt

SEQ ID NO: 190 - DNA, 30 bp, Artificial Sequence
  Description of Artificial Sequence: Synthetic oligonucleotide
ccaagttcttgagtttccaaatctgtgatt

SEQ ID NO: 191 - DNA, 23 bp, Artificial Sequence
  Description of Artificial Sequence: Synthetic oligonucleotide
agaggagaaaagtggggaagagg

SEQ ID NO: 192 - DNA, 24 bp, Artificial Sequence
  Description of Artificial Sequence: Synthetic oligonucleotide
aagacagagggagaatgctcgaaa

SEQ ID NO: 193 - DNA, 23 bp, Artificial Sequence
  Description of Artificial Sequence: Synthetic oligonucleotide
gcagagagaaagacaggcagagc

SEQ ID NO: 194 - DNA, 24 bp, Artificial Sequence
  Description of Artificial Sequence: Synthetic oligonucleotide
tcatgtaaagctgcagggtgagag

SEQ ID NO: 195 - DNA, 21 bp, Artificial Sequence
  Description of Artificial Sequence: Synthetic oligonucleotide
aggaccctgggaatggagaga

SEQ ID NO: 196 - DNA, 21 bp, Artificial Sequence
  Description of Artificial Sequence: Synthetic oligonucleotide
tgggctcctccgtgtacagag

SEQ ID NO: 197 - DNA, 22 bp, Artificial Sequence
  Description of Artificial Sequence: Synthetic oligonucleotide
cctcttccccacactttccagg

SEQ ID NO: 198 - DNA, 24 bp, Artificial Sequence
  Description of Artificial Sequence: Synthetic oligonucleotide
gttcaagctggggttagagtctca

SEQ ID NO: 199 - DNA, 20 bp, Artificial Sequence
  Description of Artificial Sequence: Synthetic oligonucleotide
agaacagtcgccgagggaaa

SEQ ID NO: 200 - DNA, 23 bp, Artificial Sequence
  Description of Artificial Sequence: Synthetic oligonucleotide
ggagtgagtcagaaggcgagtgc

SEQ ID NO: 201 - DNA, 21 bp, Artificial Sequence
  Description of Artificial Sequence: Synthetic oligonucleotide
aggctgagggcaaaggaaact

SEQ ID NO: 202 - DNA, 22 bp, Artificial Sequence
  Description of Artificial Sequence: Synthetic oligonucleotide
tgaaggagtctccacgggaatc

SEQ ID NO: 203 - DNA, 22 bp, Artificial Sequence
  Description of Artificial Sequence: Synthetic oligonucleotide
gcagcttggatttaggagcccc

SEQ ID NO: 204 - DNA, 18 bp, Artificial Sequence
  Description of Artificial Sequence: Synthetic oligonucleotide
ttctggcccctgtgacca

SEQ ID NO: 205 - DNA, 21 bp, Artificial Sequence
  Description of Artificial Sequence: Synthetic oligonucleotide
ccaggaagtggggtctgtgga

SEQ ID NO: 206 - DNA, 20 bp, Artificial Sequence
  Description of Artificial Sequence: Synthetic oligonucleotide
cgtgacccggagaaggagtg

SEQ ID NO: 207 - DNA, 21 bp, Artificial Sequence
  Description of Artificial Sequence: Synthetic oligonucleotide
cgacccgaagaagctaggcat

SEQ ID NO: 208 - DNA, 18 bp, Artificial Sequence
  Description of Artificial Sequence: Synthetic oligonucleotide
tggagctgggccaggaga

SEQ ID NO: 209 - DNA, 22 bp, Artificial Sequence
  Description of Artificial Sequence: Synthetic oligonucleotide
cgttccttttggctccctgaag

SEQ ID NO: 210 - DNA, 18 bp, Artificial Sequence
  Description of Artificial Sequence: Synthetic oligonucleotide
ttgccggcaggaccctca

SEQ ID NO: 211 - DNA, 21 bp, Artificial Sequence
  Description of Artificial Sequence: Synthetic oligonucleotide
tccttaaggaacagccctggc

SEQ ID NO: 212 - DNA, 24 bp, Artificial Sequence
  Description of Artificial Sequence: Synthetic oligonucleotide
ccttggtctccagcactatcagtg

SEQ ID NO: 213 - DNA, 22 bp, Artificial Sequence
  Description of Artificial Sequence: Synthetic oligonucleotide
accgaggacaccaaaactctcc

SEQ ID NO: 214 - DNA, 24 bp, Artificial Sequence
  Description of Artificial Sequence: Synthetic oligonucleotide
ctttatgggcccctcctcggagaa

SEQ ID NO: 215 - DNA, 30 bp, Artificial Sequence
  Description of Artificial Sequence: Synthetic oligonucleotide
ttttcactctccctaaaggttttcaggcat

SEQ ID NO: 216 - DNA, 30 bp, Artificial Sequence
  Description of Artificial Sequence: Synthetic oligonucleotide
taatgctaccccaaataataaccctgtata

SEQ ID NO: 217 - DNA, 27 bp, Artificial Sequence
  Description of Artificial Sequence: Synthetic oligonucleotide
aagagcctttttaaacacagtgtgctg

SEQ ID NO: 218 - DNA, 30 bp, Artificial Sequence
  Description of Artificial Sequence: Synthetic oligonucleotide
attgttttgctttctatctacaactttctc

SEQ ID NO: 219 - DNA, 30 bp, Artificial Sequence
  Description of Artificial Sequence: Synthetic oligonucleotide
gcatctagaataattcatccaatacagagc

SEQ ID NO: 220 - DNA, 25 bp, Artificial Sequence
  Description of Artificial Sequence: Synthetic oligonucleotide
cttccagcaattcgagcatattcta

SEQ ID NO: 221 - DNA, 26 bp, Artificial Sequence
  Description of Artificial Sequence: Synthetic oligonucleotide
atgtagctttttactttctcaggtgg

SEQ ID NO: 222 - DNA, 26 bp, Artificial Sequence
  Description of Artificial Sequence: Synthetic oligonucleotide
gcaccagtgaatagccttgattagct

SEQ ID NO: 223 - DNA, 28 bp, Artificial Sequence
  Description of Artificial Sequence: Synthetic oligonucleotide
caaatatttctcatgtcttgcactttca

SEQ ID NO: 224 - DNA, 29 bp, Artificial Sequence
  Description of Artificial Sequence: Synthetic oligonucleotide
acaaatgtaaagatctcaccacaatatcc

SEQ ID NO: 225 - DNA, 30 bp, Artificial Sequence
  Description of Artificial Sequence: Synthetic oligonucleotide
tctacaattgggagtggatctataatagtt

SEQ ID NO: 226 - DNA, 25 bp, Artificial Sequence
  Description of Artificial Sequence: Synthetic oligonucleotide
tccccaagtaagtttcaaagttcac

SEQ ID NO: 227 - DNA, 27 bp, Artificial Sequence
  Description of Artificial Sequence: Synthetic oligonucleotide
aggctatagagatcaacattttgctct

SEQ ID NO: 228 - DNA, 27 bp, Artificial Sequence
  Description of Artificial Sequence: Synthetic oligonucleotide
gtttcacattacctggtctacctgcag

SEQ ID NO: 229 - DNA, 27 bp, Artificial Sequence
  Description of Artificial Sequence: Synthetic oligonucleotide
gaaccacctatataaagcctgattcag

SEQ ID NO: 230 - DNA, 27 bp, Artificial Sequence
  Description of Artificial Sequence: Synthetic oligonucleotide
tgaagatacatactggagattgttggt

SEQ ID NO: 231 - DNA, 29 bp, Artificial Sequence
  Description of Artificial Sequence: Synthetic oligonucleotide
caacgggcacttttcactaaggggtagag

SEQ ID NO: 232 - DNA, 26 bp, Artificial Sequence
  Description of Artificial Sequence: Synthetic oligonucleotide
agtaaaggacaaaacagtttatggga

SEQ ID NO: 233 - DNA, 26 bp, Artificial Sequence
  Description of Artificial Sequence: Synthetic oligonucleotide
tttcattgctataaaccacccacttc

SEQ ID NO: 234 - DNA, 26 bp, Artificial Sequence
  Description of Artificial Sequence: Synthetic oligonucleotide
aatttgtgtcccactactgtaaaact

SEQ ID NO: 235 - DNA, 28 bp, Artificial Sequence
  Description of Artificial Sequence: Synthetic oligonucleotide
atgacctttaaactattctcacaagtga

SEQ ID NO: 236 - DNA, 28 bp, Artificial Sequence
  Description of Artificial Sequence: Synthetic oligonucleotide
tttctaggaataaaagacgatggcattc

SEQ ID NO: 237 - DNA, 22 bp, Artificial Sequence
  Description of Artificial Sequence: Synthetic oligonucleotide
ccagttgacgtggagatctacc

SEQ ID NO: 238 - DNA, 29 bp, Artificial Sequence
  Description of Artificial Sequence: Synthetic oligonucleotide
agactgttactagaatcattaccctagac

SEQ ID NO: 239 - DNA, 29 bp, Artificial Sequence
  Description of Artificial Sequence: Synthetic oligonucleotide
ggctcctcattaatatccccaaactacag

SEQ ID NO: 240 - DNA, 24 bp, Artificial Sequence
  Description of Artificial Sequence: Synthetic oligonucleotide
gcaaccaatgattcactatgcaca

SEQ ID NO: 241 - DNA, 30 bp, Artificial Sequence
  Description of Artificial Sequence: Synthetic oligonucleotide
aaagggcagaggtagtgaaatctgtagatt

SEQ ID NO: 242 - DNA, 30 bp, Artificial Sequence
  Description of Artificial Sequence: Synthetic oligonucleotide
cgcaattgtatttttagagtagaataccca

SEQ ID NO: 243 - DNA, 27 bp, Artificial Sequence
  Description of Artificial Sequence: Synthetic oligonucleotide
aattatcaatgtctaatgctgaagcca

SEQ ID NO: 244 - DNA, 30 bp, Artificial Sequence
  Description of Artificial Sequence: Synthetic oligonucleotide
acatgctttctgttacattcttctacataa

SEQ ID NO: 245 - DNA, 27 bp, Artificial Sequence
  Description of Artificial Sequence: Synthetic oligonucleotide
aatataggccaacacatttcaaaaacc

SEQ ID NO: 246 - DNA, 24 bp, Artificial Sequence
  Description of Artificial Sequence: Synthetic oligonucleotide
catgcagaccacaacttcaaaaat

SEQ ID NO: 247 - DNA, 29 bp, Artificial Sequence
  Description of Artificial Sequence: Synthetic oligonucleotide
acactgttagatcactgtaatagcatcta

SEQ ID NO: 248 - DNA, 29 bp, Artificial Sequence
  Description of Artificial Sequence: Synthetic oligonucleotide
ttctggttttatatctggagtgtcaagat

SEQ ID NO: 249 - DNA, 30 bp, Artificial Sequence
  Description of Artificial Sequence: Synthetic oligonucleotide
tcctctaccaatttaagtcaaaacataaca

SEQ ID NO: 250 - DNA, 30 bp, Artificial Sequence
  Description of Artificial Sequence: Synthetic oligonucleotide
caatttttcaacatgtgactcaaaagaatg

SEQ ID NO: 251 - DNA, 29 bp, Artificial Sequence
  Description of Artificial Sequence: Synthetic oligonucleotide
gattaaacctggaacaactatcaacattc

SEQ ID NO: 252 - DNA, 29 bp, Artificial Sequence
  Description of Artificial Sequence: Synthetic oligonucleotide
acaattttctactaggagagagtacaact

SEQ ID NO: 253 - DNA, 29 bp, Artificial Sequence
  Description of Artificial Sequence: Synthetic oligonucleotide
taatacagagttatctacatgggagacac

SEQ ID NO: 254 - DNA, 29 bp, Artificial Sequence
  Description of Artificial Sequence: Synthetic oligonucleotide
gacccatgaccctaacatacaatctaaaa

SEQ ID NO: 255 - DNA, 30 bp, Artificial Sequence
  Description of Artificial Sequence: Synthetic oligonucleotide
ggattcttagttatatgtggaggtttacat

SEQ ID NO: 256 - DNA, 30 bp, Artificial Sequence
  Description of Artificial Sequence: Synthetic oligonucleotide
gacaatgcctctatttcttgcttgtgtaat

SEQ ID NO: 257 - DNA, 30 bp, Artificial Sequence
  Description of Artificial Sequence: Synthetic oligonucleotide
caaaatctttgaaaatactgagtgacaaga

SEQ ID NO: 258 - DNA, 30 bp, Artificial Sequence
  Description of Artificial Sequence: Synthetic oligonucleotide
gccacaattaaaatctttcagatccagtat

SEQ ID NO: 259 - DNA, 30 bp, Artificial Sequence
  Description of Artificial Sequence: Synthetic oligonucleotide
ttcctgaaaatcataatgctaacaaaatgc

SEQ ID NO: 260 - DNA, 29 bp, Artificial Sequence
  Description of Artificial Sequence: Synthetic oligonucleotide
agaaatgccagaccaggagtactcttcct

SEQ ID NO: 261 - DNA, 29 bp, Artificial Sequence
  Description of Artificial Sequence: Synthetic oligonucleotide
ttcctgaccatttacaacagtcttttctc

SEQ ID NO: 262 - DNA, 18 bp, Artificial Sequence
  Description of Artificial Sequence: Synthetic oligonucleotide
gcgtactctgggagggga

SEQ ID NO: 263 - DNA, 28 bp, Artificial Sequence
  Description of Artificial Sequence: Synthetic oligonucleotide
atgtttcttcataagacacgctttgaag

SEQ ID NO: 264 - DNA, 29 bp, Artificial Sequence
  Description of Artificial Sequence: Synthetic oligonucleotide
caatcccagcgtaaaacaaaacccctaac

SEQ ID NO: 265 - DNA, 24 bp, Artificial Sequence
  Description of Artificial Sequence: Synthetic oligonucleotide
gtacgtcagttttgagacatggaa

SEQ ID NO: 266 - DNA, 30 bp, Artificial Sequence
  Description of Artificial Sequence: Synthetic oligonucleotide
ggttcactgtgaatagttatagagaatcag

SEQ ID NO: 267 - DNA, 30 bp, Artificial Sequence
  Description of Artificial Sequence: Synthetic oligonucleotide
atcacccatctaactcaccaaacacaacat

SEQ ID NO: 268 - DNA, 30 bp, Artificial Sequence
  Description of Artificial Sequence: Synthetic oligonucleotide
taccaattacagactctaccactactttta

SEQ ID NO: 269 - DNA, 29 bp, Artificial Sequence
  Description of Artificial Sequence: Synthetic oligonucleotide
agcctttacataaacagtgatggaaacaa

SEQ ID NO: 270 - DNA, 29 bp, Artificial Sequence
  Description of Artificial Sequence: Synthetic oligonucleotide
gtatttgcatatgtactgttgctgagcaa

SEQ ID NO: 271 - DNA, 26 bp, Artificial Sequence
  Description of Artificial Sequence: Synthetic oligonucleotide
tcagctctcccaataaatgcaaacct

SEQ ID NO: 272 - DNA, 28 bp, Artificial Sequence
  Description of Artificial Sequence: Synthetic oligonucleotide
tcccatgcttttataattattcagagca

SEQ ID NO: 273 - DNA, 24 bp, Artificial Sequence
  Description of Artificial Sequence: Synthetic oligonucleotide
aaagtccccacaaaagctagaaat

SEQ ID NO: 274 - DNA, 27 bp, Artificial Sequence
  Description of Artificial Sequence: Synthetic oligonucleotide
acaatgtattcactacaaaaccagtct

SEQ ID NO: 275 - DNA, 27 bp, Artificial Sequence
  Description of Artificial Sequence: Synthetic oligonucleotide
agtagagtgttccatgtcaattgaaag

SEQ ID NO: 276 - DNA, 30 bp, Artificial Sequence
  Description of Artificial Sequence: Synthetic oligonucleotide
tctcgcatgggctatttattaataatatcc

SEQ ID NO: 277 - DNA, 30 bp, Artificial Sequence
  Description of Artificial Sequence: Synthetic oligonucleotide
gcgctagtaatactttaaacaacatcaaaa

SEQ ID NO: 278 - DNA, 27 bp, Artificial Sequence
  Description of Artificial Sequence: Synthetic oligonucleotide
aagatagcaaagtccaaagttgtaact

SEQ ID NO: 279 - DNA, 28 bp, Artificial Sequence
  Description of Artificial Sequence: Synthetic oligonucleotide
tgtaattagcattattgccttctgacag

SEQ ID NO: 280 - DNA, 28 bp, Artificial Sequence
  Description of Artificial Sequence: Synthetic oligonucleotide
cattctattttgggacggtaactcaccc

SEQ ID NO: 281 - DNA, 25 bp, Artificial Sequence
  Description of Artificial Sequence: Synthetic oligonucleotide
tacgcttgccaaaaattcatatggt

SEQ ID NO: 282 - DNA, 25 bp, Artificial Sequence
  Description of Artificial Sequence: Synthetic oligonucleotide
gcaattttattaggaggttggggat

SEQ ID NO: 283 - DNA, 25 bp, Artificial Sequence
  Description of Artificial Sequence: Synthetic oligonucleotide
aaatgagataagactcctggggata

SEQ ID NO: 284 - DNA, 25 bp, Artificial Sequence
  Description of Artificial Sequence: Synthetic oligonucleotide
caatttgcttcaagaccaagtgtac

SEQ ID NO: 285 - DNA, 25 bp, Artificial Sequence
  Description of Artificial Sequence: Synthetic oligonucleotide
tacttgggaccagctctttctttct

SEQ ID NO: 286 - DNA, 22 bp, Artificial Sequence
  Description of Artificial Sequence: Synthetic oligonucleotide
gggaatgggaatgtttgtcctg

SEQ ID NO: 287 - DNA, 25 bp, Artificial Sequence
  Description of Artificial Sequence: Synthetic oligonucleotide
ggaaggtggggcattgtaaaaataa

SEQ ID NO: 288 - DNA, 23 bp, Artificial Sequence
  Description of Artificial Sequence: Synthetic oligonucleotide
gccgtacctagcaaattcatgga

SEQ ID NO: 289 - DNA, 23 bp, Artificial Sequence
  Description of Artificial Sequence: Synthetic oligonucleotide
agccacctctgagatcccagaac

SEQ ID NO: 290 - DNA, 23 bp, Artificial Sequence
  Description of Artificial Sequence: Synthetic oligonucleotide
tccaacctgtgaaagcttcaaca

SEQ ID NO: 291 - DNA, 23 bp, Artificial Sequence
  Description of Artificial Sequence: Synthetic oligonucleotide
aagagcttgcaagtccagcctgg

SEQ ID NO: 292 - DNA, 21 bp, Artificial Sequence
  Description of Artificial Sequence: Synthetic oligonucleotide
aagatgccctagtgcccaggc

SEQ ID NO: 293 - DNA, 21 bp, Artificial Sequence
  Description of Artificial Sequence: Synthetic oligonucleotide
actgcagaaatcccacacaag

SEQ ID NO: 294 - DNA, 25 bp, Artificial Sequence
  Description of Artificial Sequence: Synthetic oligonucleotide
aagtggtaaagtttgatagcatcca

SEQ ID NO: 295 - DNA, 25 bp, Artificial Sequence
  Description of Artificial Sequence: Synthetic oligonucleotide
cagaccaggtgcagcttaggccacc

SEQ ID NO: 296 - DNA, 21 bp, Artificial Sequence
  Description of Artificial Sequence: Synthetic oligonucleotide
tctccctgtattccgttgcag

SEQ ID NO: 297 - DNA, 23 bp, Artificial Sequence
  Description of Artificial Sequence: Synthetic oligonucleotide
tgccagggcttttgatgcaaaac

SEQ ID NO: 298 - DNA, 20 bp, Artificial Sequence
  Description of Artificial Sequence: Synthetic oligonucleotide
cgccaggcgttattcatcaa

SEQ ID NO: 299 - DNA, 25 bp, Artificial Sequence
  Description of Artificial Sequence: Synthetic oligonucleotide
ccaagtggacagttcatgagattag

SEQ ID NO: 300 - DNA, 25 bp, Artificial Sequence
  Description of Artificial Sequence: Synthetic oligonucleotide
tgactcctaacagtgtaatctgaga

SEQ ID NO: 301 - DNA, 25 bp, Artificial Sequence
  Description of Artificial Sequence: Synthetic oligonucleotide
aagaagaggaggtctgcagagatag

SEQ ID NO: 302 - DNA, 22 bp, Artificial Sequence
  Description of Artificial Sequence: Synthetic oligonucleotide
aagagcacgctggacaaaagcc

SEQ ID NO: 303 - DNA, 24 bp, Artificial Sequence
  Description of Artificial Sequence: Synthetic oligonucleotide
ggaacgggctttgaaattggataa

SEQ ID NO: 304 - DNA, 25 bp, Artificial Sequence
  Description of Artificial Sequence: Synthetic oligonucleotide
agacagaaattcataccaggagtgg

SEQ ID NO: 305 - DNA, 25 bp, Artificial Sequence
  Description of Artificial Sequence: Synthetic oligonucleotide
ctgtcatgttctacaggaagtcatc

SEQ ID NO: 306 - DNA, 25 bp, Artificial Sequence
  Description of Artificial Sequence: Synthetic oligonucleotide
ccagtgcctacaactacaaatactt

SEQ ID NO: 307 - DNA, 25 bp, Artificial Sequence
  Description of Artificial Sequence: Synthetic oligonucleotide
gctgatacctaattctgagtgcaat

SEQ ID NO: 308 - DNA, 25 bp, Artificial Sequence
  Description of Artificial Sequence: Synthetic oligonucleotide
tatggatggcaaagcatataaagct

SEQ ID NO: 309 - DNA, 20 bp, Artificial Sequence
  Description of Artificial Sequence: Synthetic oligonucleotide
actccagaactcgctgaagc

SEQ ID NO: 310 - DNA, 25 bp, Artificial Sequence
  Description of Artificial Sequence: Synthetic oligonucleotide
agagcacatttgtcacatgccagag

SEQ ID NO: 311 - DNA, 24 bp, Artificial Sequence
  Description of Artificial Sequence: Synthetic oligonucleotide
tgatatcaccaacgaagctcttct

SEQ ID NO: 312 - DNA, 25 bp, Artificial Sequence
  Description of Artificial Sequence: Synthetic oligonucleotide
ttgccctttgtgcatacgattagct

SEQ ID NO: 313 - DNA, 25 bp, Artificial Sequence
  Description of Artificial Sequence: Synthetic oligonucleotide
cattccagacccctgcaactgattg

SEQ ID NO: 314 - DNA, 25 bp, Artificial Sequence
  Description of Artificial Sequence: Synthetic oligonucleotide
actttaagacactttcagtcagctt

SEQ ID NO: 315 - DNA, 25 bp, Artificial Sequence
  Description of Artificial Sequence: Synthetic oligonucleotide
tggtctgaacaaacttaggacaaat

SEQ ID NO: 316 - DNA, 25 bp, Artificial Sequence
  Description of Artificial Sequence: Synthetic oligonucleotide
cttatggaatgtctcacctgcagat

SEQ ID NO: 317 - DNA, 25 bp, Artificial Sequence
  Description of Artificial Sequence: Synthetic oligonucleotide
acagtttaccaagagtcccactaat

SEQ ID NO: 318 - DNA, 25 bp, Artificial Sequence
  Description of Artificial Sequence: Synthetic oligonucleotide
cctgacatacactgctagctgatat

SEQ ID NO: 319 - DNA, 22 bp, Artificial Sequence
  Description of Artificial Sequence: Synthetic oligonucleotide
cagcatcttgtgtccacatctc

SEQ ID NO: 320 - DNA, 24 bp, Artificial Sequence
  Description of Artificial Sequence: Synthetic oligonucleotide
ggagcagtcaggtatagagaaagg

SEQ ID NO: 321 - DNA, 22 bp, Artificial Sequence
  Description of Artificial Sequence: Synthetic oligonucleotide
tgagagacaaatgagcacctgg

SEQ ID NO: 322 - DNA, 22 bp, Artificial Sequence
  Description of Artificial Sequence: Synthetic oligonucleotide
gcaagatactgcccaggaaact

SEQ ID NO: 323 - DNA, 23 bp, Artificial Sequence
  Description of Artificial Sequence: Synthetic oligonucleotide
catagctcagagccaagaaagag

SEQ ID NO: 324 - DNA, 24 bp, Artificial Sequence
  Description of Artificial Sequence: Synthetic oligonucleotide
cctgtataacccctcctccaaaag

SEQ ID NO: 325 - DNA, 25 bp, Artificial Sequence
  Description of Artificial Sequence: Synthetic oligonucleotide
agaaggcaagtaaaacagtttcact

SEQ ID NO: 326 - DNA, 25 bp, Artificial Sequence
  Description of Artificial Sequence: Synthetic oligonucleotide
agtgtttagcccttaaacccctaac

SEQ ID NO: 327 - DNA, 18 bp, Artificial Sequence
  Description of Artificial Sequence: Synthetic oligonucleotide
atgtgagcctgggagtcc

SEQ ID NO: 328 - DNA, 25 bp, Artificial Sequence
  Description of Artificial Sequence: Synthetic oligonucleotide
ttcatgtgtctcctctgtctagtaa

SEQ ID NO: 329 - DNA, 25 bp, Artificial Sequence
  Description of Artificial Sequence: Synthetic oligonucleotide
ttttctatctcttcaaccctgcatt

SEQ ID NO: 330 - DNA, 23 bp, Artificial Sequence
  Description of Artificial Sequence: Synthetic oligonucleotide
agcacaaaaccccagagtagctg

SEQ ID NO: 331 - DNA, 25 bp, Artificial Sequence
  Description of Artificial Sequence: Synthetic oligonucleotide
gaaccagccatatgaggagacactg

SEQ ID NO: 332 - DNA, 25 bp, Artificial Sequence
  Description of Artificial Sequence: Synthetic oligonucleotide
tagacagcctatttagtgaggaagg

SEQ ID NO: 333 - DNA, 25 bp, Artificial Sequence
  Description of Artificial Sequence: Synthetic oligonucleotide
cagaacacttgctctgtggtaggaa

SEQ ID NO: 334 - DNA, 25 bp, Artificial Sequence
  Description of Artificial Sequence: Synthetic oligonucleotide
cttcttctgcccattccacaaatat

SEQ ID NO: 335 - DNA, 24 bp, Artificial Sequence
  Description of Artificial Sequence: Synthetic oligonucleotide
acattgttcaatgaaatgcagcat

SEQ ID NO: 336 - DNA, 25 bp, Artificial Sequence
  Description of Artificial Sequence: Synthetic oligonucleotide
tagagaattccctgcagtaaagtgc

SEQ ID NO: 337 - DNA, 25 bp, Artificial Sequence
  Description of Artificial Sequence: Synthetic oligonucleotide
agacaaagcacacagagcatatttt

SEQ ID NO: 338 - DNA, 25 bp, Artificial Sequence
  Description of Artificial Sequence: Synthetic oligonucleotide
ccatgaaggtaaacgctgactaaaa

SEQ ID NO: 339 - DNA, 25 bp, Artificial Sequence
  Description of Artificial Sequence: Synthetic oligonucleotide
ttacacgcatgagaatacaaaccaa

SEQ ID NO: 340 - DNA, 25 bp, Artificial Sequence
  Description of Artificial Sequence: Synthetic oligonucleotide
aatgaccttggaattatgcagaact

SEQ ID NO: 341 - DNA, 21 bp, Artificial Sequence
  Description of Artificial Sequence: Synthetic oligonucleotide
caagcagttcaaagccaaagc

SEQ ID NO: 342 - DNA, 25 bp, Artificial Sequence
  Description of Artificial Sequence: Synthetic oligonucleotide
cattcaccctcgtgctttcaggaat

SEQ ID NO: 343 - DNA, 25 bp, Artificial Sequence
  Description of Artificial Sequence: Synthetic oligonucleotide
actttactttgcatgctcactacaa

SEQ ID NO: 344 - DNA, 18 bp, Artificial Sequence
  Description of Artificial Sequence: Synthetic oligonucleotide
acacctgccccatggtta

SEQ ID NO: 345 - DNA, 20 bp, Artificial Sequence
  Description of Artificial Sequence: Synthetic oligonucleotide
agtgagtttggatggggtgg

SEQ ID NO: 346 - DNA, 22 bp, Artificial Sequence
  Description of Artificial Sequence: Synthetic oligonucleotide
tgctgttaaacctgcagtgtgc

SEQ ID NO: 347 - DNA, 18 bp, Artificial Sequence
  Description of Artificial Sequence: Synthetic oligonucleotide
cagacatgaagctgcggc

SEQ ID NO: 348 - DNA, 23 bp, Artificial Sequence
  Description of Artificial Sequence: Synthetic oligonucleotide
tgccagcatgatcatgtcccctg

SEQ ID NO: 349 - DNA, 23 bp, Artificial Sequence
  Description of Artificial Sequence: Synthetic oligonucleotide
tgtttccgctaaatcttgtgctc

SEQ ID NO: 350 - DNA, 19 bp, Artificial Sequence
  Description of Artificial Sequence: Synthetic oligonucleotide
tccacagaccctggaatgg

SEQ ID NO: 351 - DNA, 20 bp, Artificial Sequence
  Description of Artificial Sequence: Synthetic oligonucleotide
gagtggaaaccaacctgctg

SEQ ID NO: 352 - DNA, 20 bp, Artificial Sequence
  Description of Artificial Sequence: Synthetic oligonucleotide
ccaggcctttgctttcactg

SEQ ID NO: 353 - DNA, 20 bp, Artificial Sequence
  Description of Artificial Sequence: Synthetic oligonucleotide
cgggaacaggactgctcagt

SEQ ID NO: 354 - DNA, 24 bp, Artificial Sequence
  Description of Artificial Sequence: Synthetic oligonucleotide
ggtagggcgtgatctttatctcta

SEQ ID NO: 355 - DNA, 19 bp, Artificial Sequence
  Description of Artificial Sequence: Synthetic oligonucleotide
tgctcatcgctcacaacca

SEQ ID NO: 356 - DNA, 21 bp, Artificial Sequence
  Description of Artificial Sequence: Synthetic oligonucleotide
acaataccacccctgtcacag

SEQ ID NO: 357 - DNA, 21 bp, Artificial Sequence
  Description of Artificial Sequence: Synthetic oligonucleotide
gtgctagacaatggagacccg

SEQ ID NO: 358 - DNA, 22 bp, Artificial Sequence
  Description of Artificial Sequence: Synthetic oligonucleotide
ctctttgaggacaactatgccc

SEQ ID NO: 359 - DNA, 24 bp, Artificial Sequence
  Description of Artificial Sequence: Synthetic oligonucleotide
tgagtgaagtgtacagtgaacaac

SEQ ID NO: 360 - DNA, 24 bp, Artificial Sequence
  Description of Artificial Sequence: Synthetic oligonucleotide
tgggaagttgtagcttgcgtcagc

SEQ ID NO: 361 - DNA, 24 bp, Artificial Sequence
  Description of Artificial Sequence: Synthetic oligonucleotide
gggaagacgccctcagaagattgg

SEQ ID NO: 362 - DNA, 23 bp, Artificial Sequence
  Description of Artificial Sequence: Synthetic oligonucleotide
gcttgcagatataagggccaaaa

SEQ ID NO: 363 - DNA, 24 bp, Artificial Sequence
  Description of Artificial Sequence: Synthetic oligonucleotide
cagtcacgctgcagtcctgtcagg

SEQ ID NO: 364 - DNA, 21 bp, Artificial Sequence
  Description of Artificial Sequence: Synthetic oligonucleotide
gctttgttcttgttgcgggtg

SEQ ID NO: 365 - DNA, 21 bp, Artificial Sequence
  Description of Artificial Sequence: Synthetic oligonucleotide
agcatggacaactcactcctc

SEQ ID NO: 366 - DNA, 21 bp, Artificial Sequence
  Description of Artificial Sequence: Synthetic oligonucleotide
gagagctgcggtccacatgag

SEQ ID NO: 367 - DNA, 22 bp, Artificial Sequence
  Description of Artificial Sequence: Synthetic oligonucleotide
ctcttaaccaccaagcagcatg

SEQ ID NO: 368 - DNA, 20 bp, Artificial Sequence
  Description of Artificial Sequence: Synthetic oligonucleotide
gctcaccccacagagatctt

SEQ ID NO: 369 - DNA, 20 bp, Artificial Sequence
  Description of Artificial Sequence: Synthetic oligonucleotide
cacaagaacaaccagctggc

SEQ ID NO: 370 - DNA, 21 bp, Artificial Sequence
  Description of Artificial Sequence: Synthetic oligonucleotide
gccgcctacaccacccatttc

SEQ ID NO: 371 - DNA, 21 bp, Artificial Sequence
  Description of Artificial Sequence: Synthetic oligonucleotide
ctcccaacttacaacccagtg

SEQ ID NO: 372 - DNA, 21 bp, Artificial Sequence
  Description of Artificial Sequence: Synthetic oligonucleotide
cctcttctctcagacagcctg

SEQ ID NO: 373 - DNA, 19 bp, Artificial Sequence
  Description of Artificial Sequence: Synthetic oligonucleotide
ccgtcctctcgctgttaga

SEQ ID NO: 374 - DNA, 22 bp, Artificial Sequence
  Description of Artificial Sequence: Synthetic oligonucleotide
tgctgtgcagttggcctcgtgg

SEQ ID NO: 375 - DNA, 22 bp, Artificial Sequence
  Description of Artificial Sequence: Synthetic oligonucleotide
ctctcagcctgtctgggtccct

SEQ ID NO: 376 - DNA, 24 bp, Artificial Sequence
  Description of Artificial Sequence: Synthetic oligonucleotide
ctccctctgcttataggttgtgcc

SEQ ID NO: 377 - DNA, 22 bp, Artificial Sequence
  Description of Artificial Sequence: Synthetic oligonucleotide
aatgcaggtgtcatacaggtga

SEQ ID NO: 378 - DNA, 22 bp, Artificial Sequence
  Description of Artificial Sequence: Synthetic oligonucleotide
attgtcagagccgtgagtctca

SEQ ID NO: 379 - DNA, 22 bp, Artificial Sequence
  Description of Artificial Sequence: Synthetic oligonucleotide
gttctccgatgtgtaagggctc

SEQ ID NO: 380 - DNA, 18 bp, Artificial Sequence
  Description of Artificial Sequence: Synthetic oligonucleotide
cactgtctgtgccggtgg

SEQ ID NO: 381 - DNA, 19 bp, Artificial Sequence
  Description of Artificial Sequence: Synthetic oligonucleotide
ggcgccactcagccctcat

SEQ ID NO: 382 - DNA, 23 bp, Artificial Sequence
  Description of Artificial Sequence: Synthetic oligonucleotide
gtctccctagaaggtgatgctga

SEQ ID NO: 383 - DNA, 18 bp, Artificial Sequence
  Description of Artificial Sequence: Synthetic oligonucleotide
tgaaagccagccacctgt

SEQ ID NO: 384 - DNA, 18 bp, Artificial Sequence
  Description of Artificial Sequence: Synthetic oligonucleotide
ggcacaccagggcaaaac

SEQ ID NO: 385 - DNA, 19 bp, Artificial Sequence
  Description of Artificial Sequence: Synthetic oligonucleotide
ctgcctggtactgccctat

SEQ ID NO: 386 - DNA, 21 bp, Artificial Sequence
  Description of Artificial Sequence: Synthetic oligonucleotide
ctttgtgcccaatgtgctcta

SEQ ID NO: 387 - DNA, 21 bp, Artificial Sequence
  Description of Artificial Sequence: Synthetic oligonucleotide
tctgactgcctggtatgtgcc

SEQ ID NO: 388 - DNA, 21 bp, Artificial Sequence
  Description of Artificial Sequence: Synthetic oligonucleotide
tcattttggtggggaggtttg

SEQ ID NO: 389 - DNA, 21 bp, Artificial Sequence
  Description of Artificial Sequence: Synthetic oligonucleotide
ccagctgtgtgactgcctgtc

SEQ ID NO: 390 - DNA, 21 bp, Artificial Sequence
  Description of Artificial Sequence: Synthetic oligonucleotide
gtccatgcccaatcccgaggg

SEQ ID NO: 391 - DNA, 21 bp, Artificial Sequence
  Description of Artificial Sequence: Synthetic oligonucleotide
tcacctacaacacagacacgt

SEQ ID NO: 392 - DNA, 19 bp, Artificial Sequence
  Description of Artificial Sequence: Synthetic oligonucleotide
caggagtgggccttcagat

SEQ ID NO: 393 - DNA, 21 bp, Artificial Sequence
  Description of Artificial Sequence: Synthetic oligonucleotide
ctgggctcagacctggggaac

SEQ ID NO: 394 - DNA, 24 bp, Artificial Sequence
  Description of Artificial Sequence: Synthetic oligonucleotide
cacctatttactgatgggcgttta

SEQ ID NO: 395 - DNA, 21 bp, Artificial Sequence
  Description of Artificial Sequence: Synthetic oligonucleotide
tctggttgttgtgaggggtaa

SEQ ID NO: 396 - DNA, 21 bp, Artificial Sequence
  Description of Artificial Sequence: Synthetic oligonucleotide
tgggaatctcacagtgctgat

SEQ ID NO: 397 - DNA, 24 bp, Artificial Sequence
  Description of Artificial Sequence: Synthetic oligonucleotide
ctcactagcacaatgaccttgaat

SEQ ID NO: 398 - DNA, 18 bp, Artificial Sequence
  Description of Artificial Sequence: Synthetic oligonucleotide
gtgggatcctgcaccctc

SEQ ID NO: 399 - DNA, 24 bp, Artificial Sequence
  Description of Artificial Sequence: Synthetic oligonucleotide
cctgatctccttagacaactacct

SEQ ID NO: 400 - DNA, 24 bp, Artificial Sequence
  Description of Artificial Sequence: Synthetic oligonucleotide
tgcacgaagggccagggtatgtgg

SEQ ID NO: 401 - DNA, 23 bp, Artificial Sequence
  Description of Artificial Sequence: Synthetic oligonucleotide
agttcctgtccctctgcgcatgc

SEQ ID NO: 402 - DNA, 23 bp, Artificial Sequence
  Description of Artificial Sequence: Synthetic oligonucleotide
gtgcccgaggtacccactcactg

SEQ ID NO: 403 - DNA, 23 bp, Artificial Sequence
  Description of Artificial Sequence: Synthetic oligonucleotide
gcagaggatggaacacagcggtg

SEQ ID NO: 404 - DNA, 20 bp, Artificial Sequence
  Description of Artificial Sequence: Synthetic oligonucleotide
tcagtgtgctatggtctggg

SEQ ID NO: 405 - DNA, 20 bp, Artificial Sequence
  Description of Artificial Sequence: Synthetic oligonucleotide
tgagacggccccttccccac

SEQ ID NO: 406 - DNA, 20 bp, Artificial Sequence
  Description of Artificial Sequence: Synthetic oligonucleotide
tgttgacctgtcccggtatg

SEQ ID NO: 407 - DNA, 20 bp, Artificial Sequence
  Description of Artificial Sequence: Synthetic oligonucleotide
gcccggaccctgatgctcat

SEQ ID NO: 408 - DNA, 22 bp, Artificial Sequence
  Description of Artificial Sequence: Synthetic oligonucleotide
ggcacgatgacctgagacagtg

SEQ ID NO: 409 - DNA, 22 bp, Artificial Sequence
  Description of Artificial Sequence: Synthetic oligonucleotide
cggagagctttgatgggtaaga

SEQ ID NO: 410 - DNA, 22 bp, Artificial Sequence
  Description of Artificial Sequence: Synthetic oligonucleotide
agaagatctttgggagcctggc

SEQ ID NO: 411 - DNA, 23 bp, Artificial Sequence
  Description of Artificial Sequence: Synthetic oligonucleotide
cagttaccagtgccaatatccag

SEQ ID NO: 412 - DNA, 22 bp, Artificial Sequence
  Description of Artificial Sequence: Synthetic oligonucleotide
ctttatgtgaggctctgaaccg

SEQ ID NO: 413 - DNA, 24 bp, Artificial Sequence
  Description of Artificial Sequence: Synthetic oligonucleotide
tgctctgtatagtgattggggtag

SEQ ID NO: 414 - DNA, 24 bp, Artificial Sequence
  Description of Artificial Sequence: Synthetic oligonucleotide
ggaggcacacaaggacatttctgg

SEQ ID NO: 415 - DNA, 24 bp, Artificial Sequence
  Description of Artificial Sequence: Synthetic oligonucleotide
cctttcacacttcctttacctcca

SEQ ID NO: 416 - DNA, 24 bp, Artificial Sequence
  Description of Artificial Sequence: Synthetic oligonucleotide
tggttttcgtcgttttggtgggga

SEQ ID NO: 417 - DNA, 24 bp, Artificial Sequence
  Description of Artificial Sequence: Synthetic oligonucleotide
acctagaccgtttatgcatctgta

SEQ ID NO: 418 - DNA, 24 bp, Artificial Sequence
  Description of Artificial Sequence: Synthetic oligonucleotide
gaacatgggccagtgtctccctag

SEQ ID NO: 419 - DNA, 24 bp, Artificial Sequence
  Description of Artificial Sequence: Synthetic oligonucleotide
acaaacagttccactttgtgtgtg

SEQ ID NO: 420 - DNA, 18 bp, Artificial Sequence
  Description of Artificial Sequence: Synthetic oligonucleotide
gatgggaacagctgggct

SEQ ID NO: 421 - DNA, 19 bp, Artificial Sequence
  Description of Artificial Sequence: Synthetic oligonucleotide
actaaggcctgggctttga

SEQ ID NO: 422 - DNA, 21 bp, Artificial Sequence
  Description of Artificial Sequence: Synthetic oligonucleotide
tgctgggagtgatgtccaccc

SEQ ID NO: 423 - DNA, 24 bp, Artificial Sequence
  Description of Artificial Sequence: Synthetic oligonucleotide
tacatctcagcatggccggacagc

SEQ ID NO: 424 - DNA, 24 bp, Artificial Sequence
  Description of Artificial Sequence: Synthetic oligonucleotide
cactcctttaatctcaccctctgc

SEQ ID NO: 425 - DNA, 18 bp, Artificial Sequence
  Description of Artificial Sequence: Synthetic oligonucleotide
ggaaggggtccgtggtaa

SEQ ID NO: 426 - DNA, 24 bp, Artificial Sequence
  Description of Artificial Sequence: Synthetic oligonucleotide
ttccatgaaagtctgcagagtgtg

SEQ ID NO: 427 - DNA, 24 bp, Artificial Sequence
  Description of Artificial Sequence: Synthetic oligonucleotide
gctttgggcctgagggagtactcc

SEQ ID NO: 428 - DNA, 23 bp, Artificial Sequence
  Description of Artificial Sequence: Synthetic oligonucleotide
gggagtcccagttttcttaagac

SEQ ID NO: 429 - DNA, 21 bp, Artificial Sequence
  Description of Artificial Sequence: Synthetic oligonucleotide
tctgaagagatagtgcccagc

SEQ ID NO: 430 - DNA, 21 bp, Artificial Sequence
  Description of Artificial Sequence: Synthetic oligonucleotide
agccattgagacccagagcag

SEQ ID NO: 431 - DNA, 21 bp, Artificial Sequence
  Description of Artificial Sequence: Synthetic oligonucleotide
ggtctctaactgcccctcccc

SEQ ID NO: 432 - DNA, 23 bp, Artificial Sequence
  Description of Artificial Sequence: Synthetic oligonucleotide
gagggacggtgaggcagggtgga

SEQ ID NO: 433 - DNA, 23 bp, Artificial Sequence
  Description of Artificial Sequence: Synthetic oligonucleotide
cagcttgatgaggtcaatgggat

SEQ ID NO: 434 - DNA, 23 bp, Artificial Sequence
  Description of Artificial Sequence: Synthetic oligonucleotide
gagttgaaggggtcattgggaag

SEQ ID NO: 435 - DNA, 18 bp, Artificial Sequence
  Description of Artificial Sequence: Synthetic oligonucleotide
gtgagctggctgccgact

SEQ ID NO: 436 - DNA, 18 bp, Artificial Sequence
  Description of Artificial Sequence: Synthetic oligonucleotide
tccagctggcagggcgta

SEQ ID NO: 437 - DNA, 20 bp, Artificial Sequence
  Description of Artificial Sequence: Synthetic oligonucleotide
acagtttccccacaggtcct

SEQ ID NO: 438 - DNA, 22 bp, Artificial Sequence
  Description of Artificial Sequence: Synthetic oligonucleotide
ccctgcctgaacctcaccatgg

SEQ ID NO: 439 - DNA, 21 bp, Artificial Sequence
  Description of Artificial Sequence: Synthetic oligonucleotide
ttcagcctggagtagctatcc

SEQ ID NO: 440 - DNA, 24 bp, Artificial Sequence
  Description of Artificial Sequence: Synthetic oligonucleotide
ccagcccgtgtatctgcctcctgg

SEQ ID NO: 441 - DNA, 24 bp, Artificial Sequence
  Description of Artificial Sequence: Synthetic oligonucleotide
gtgtgtgttcgcctccatttctct

SEQ ID NO: 442 - DNA, 19 bp, Artificial Sequence
  Description of Artificial Sequence: Synthetic oligonucleotide
catcctgcagtgttgaggc

SEQ ID NO: 443 - DNA, 19 bp, Artificial Sequence
  Description of Artificial Sequence: Synthetic oligonucleotide
tgagaccgtagccaggcac

SEQ ID NO: 444 - DNA, 19 bp, Artificial Sequence
  Description of Artificial Sequence: Synthetic oligonucleotide
gctcaggtaggcgatgggc

SEQ ID NO: 445 - DNA, 20 bp, Artificial Sequence
  Description of Artificial Sequence: Synthetic oligonucleotide
ggagtgtgagtgccataggg

SEQ ID NO: 446 - DNA, 18 bp, Artificial Sequence
  Description of Artificial Sequence: Synthetic oligonucleotide
gtttgcgagtctggctgg

SEQ ID NO: 447 - DNA, 23 bp, Artificial Sequence
  Description of Artificial Sequence: Synthetic oligonucleotide
tggtgtgcgggctcacggttgag

SEQ ID NO: 448 - DNA, 23 bp, Artificial Sequence
  Description of Artificial Sequence: Synthetic oligonucleotide
cagatgctcctaaagaccaaggg

SEQ ID NO: 449 - DNA, 24 bp, Artificial Sequence
  Description of Artificial Sequence: Synthetic oligonucleotide
agtcccttctgattgtgagtctta

SEQ ID NO: 450 - DNA, 24 bp, Artificial Sequence
  Description of Artificial Sequence: Synthetic oligonucleotide
caggccgtgcttggttttggggtg

SEQ ID NO: 451 - DNA, 24 bp, Artificial Sequence
  Description of Artificial Sequence: Synthetic oligonucleotide
ggaagaaagaattgggacttctca

SEQ ID NO: 452 - DNA, 24 bp, Artificial Sequence
  Description of Artificial Sequence: Synthetic oligonucleotide
ggatccaaaagccattgtctagtt

SEQ ID NO: 453 - DNA, 18 bp, Artificial Sequence
  Description of Artificial Sequence: Synthetic oligonucleotide
ccatggagcctgagcctt

SEQ ID NO: 454 - DNA, 18 bp, Artificial Sequence
  Description of Artificial Sequence: Synthetic oligonucleotide
cgcctccttgtctgcgtg

SEQ ID NO: 455 - DNA, 24 bp, Artificial Sequence
  Description of Artificial Sequence: Synthetic oligonucleotide
ccggtgattgatgatgtcagagat

SEQ ID NO: 456 - DNA, 24 bp, Artificial Sequence
  Description of Artificial Sequence: Synthetic oligonucleotide
tgtgttgaatcatgggtgttgcca

SEQ ID NO: 457 - DNA, 20 bp, Artificial Sequence
  Description of Artificial Sequence: Synthetic oligonucleotide
gtgggtgacaactcaagacc

SEQ ID NO: 458 - DNA, 20 bp, Artificial Sequence
  Description of Artificial Sequence: Synthetic oligonucleotide
actggagtgtcctgccacag

SEQ ID NO: 459 - DNA, 20 bp, Artificial Sequence
  Description of Artificial Sequence: Synthetic oligonucleotide
ttgcacgaagagccccagac

SEQ ID NO: 460 - DNA, 20 bp, Artificial Sequence
  Description of Artificial Sequence: Synthetic oligonucleotide
ggcacgggtgagatggttct

SEQ ID NO: 461 - DNA, 18 bp, Artificial Sequence
  Description of Artificial Sequence: Synthetic oligonucleotide
cgtcagcagccaccacca

SEQ ID NO: 462 - DNA, 24 bp, Artificial Sequence
  Description of Artificial Sequence: Synthetic oligonucleotide
gtgatctccaaattatgccagcta

SEQ ID NO: 463 - DNA, 24 bp, Artificial Sequence
  Description of Artificial Sequence: Synthetic oligonucleotide
tcccctgcactttattgaatttgc

SEQ ID NO: 464 - DNA, 24 bp, Artificial Sequence
  Description of Artificial Sequence: Synthetic oligonucleotide
ccgaatgataaacgtcttgtcaca

SEQ ID NO: 465 - DNA, 24 bp, Artificial Sequence
  Description of Artificial Sequence: Synthetic oligonucleotide
agcagctgccatttcaatagaatt

SEQ ID NO: 466 - DNA, 18 bp, Artificial Sequence
  Description of Artificial Sequence: Synthetic oligonucleotide
actccccacttgccccag

SEQ ID NO: 467 - DNA, 18 bp, Artificial Sequence
  Description of Artificial Sequence: Synthetic oligonucleotide
agattctccccgccaggt

SEQ ID NO: 468 - DNA, 20 bp, Artificial Sequence
  Description of Artificial Sequence: Synthetic oligonucleotide
gtggtgtgtgcggctcagcg

SEQ ID NO: 469 - DNA, 21 bp, Artificial Sequence
  Description of Artificial Sequence: Synthetic oligonucleotide
cgaccccatcgcttctttaaa

SEQ ID NO: 470 - DNA, 18 bp, Artificial Sequence
  Description of Artificial Sequence: Synthetic oligonucleotide
ctggctatggggtggggt

SEQ ID NO: 471 - DNA, 18 bp, Artificial Sequence
  Description of Artificial Sequence: Synthetic oligonucleotide
gagctggagtagacgcgt

SEQ ID NO: 472 - DNA, 20 bp, Artificial Sequence
  Description of Artificial Sequence: Synthetic oligonucleotide
agggctgggtgagtggaggc

SEQ ID NO: 473 - DNA, 20 bp, Artificial Sequence
  Description of Artificial Sequence: Synthetic oligonucleotide
cccgtgaacgcgtgctgtgt

SEQ ID NO: 474 - DNA, 20 bp, Artificial Sequence
  Description of Artificial Sequence: Synthetic oligonucleotide
gctggagtgcgtggcaatgc

SEQ ID NO: 475 - DNA, 20 bp, Artificial Sequence
  Description of Artificial Sequence: Synthetic oligonucleotide
aacttgatgtgtgggttggg

SEQ ID NO: 476 - DNA, 18 bp, Artificial Sequence
  Description of Artificial Sequence: Synthetic oligonucleotide
tacacgctgacgccggag

SEQ ID NO: 477 - DNA, 18 bp, Artificial Sequence
  Description of Artificial Sequence: Synthetic oligonucleotide
tgcccaagcccgagtgct

SEQ ID NO: 478 - DNA, 21 bp, Artificial Sequence
  Description of Artificial Sequence: Synthetic oligonucleotide
gcaagatctctgcgtccttcc

SEQ ID NO: 479 - DNA, 21 bp, Artificial Sequence
  Description of Artificial Sequence: Synthetic oligonucleotide
gcctgcagggtgggatttgcc

SEQ ID NO: 480 - DNA, 24 bp, Artificial Sequence
  Description of Artificial Sequence: Synthetic oligonucleotide
gcaaatacactacggtatggcttt

SEQ ID NO: 481 - DNA, 23 bp, Artificial Sequence
  Description of Artificial Sequence: Synthetic oligonucleotide
acgtgtctctctggacattgacc

SEQ ID NO: 482 - DNA, 20 bp, Artificial Sequence
  Description of Artificial Sequence: Synthetic oligonucleotide
gaccagatcaccctcctcaa

SEQ ID NO: 483 - DNA, 20 bp, Artificial Sequence
  Description of Artificial Sequence: Synthetic oligonucleotide
cggcttcaccaccctcacca

SEQ ID NO: 484 - DNA, 22 bp, Artificial Sequence
  Description of Artificial Sequence: Synthetic oligonucleotide
tgcccaccgcccaaatgtctgc

SEQ ID NO: 485 - DNA, 24 bp, Artificial Sequence
  Description of Artificial Sequence: Synthetic oligonucleotide
tccttccagccagacagccaccct

SEQ ID NO: 486 - DNA, 24 bp, Artificial Sequence
  Description of Artificial Sequence: Synthetic oligonucleotide
ataaagattcacgtaggagccagg

SEQ ID NO: 487 - DNA, 24 bp, Artificial Sequence
  Description of Artificial Sequence: Synthetic oligonucleotide
cagccatccatccatttagccagt

SEQ ID NO: 488 - DNA, 20 bp, Artificial Sequence
  Description of Artificial Sequence: Synthetic oligonucleotide
aagggctcggtccacctgtt

SEQ ID NO: 489 - DNA, 20 bp, Artificial Sequence
  Description of Artificial Sequence: Synthetic oligonucleotide
gggaactgccaaagcctagg

SEQ ID NO: 490 - DNA, 24 bp, Artificial Sequence
  Description of Artificial Sequence: Synthetic oligonucleotide
ggaggtttagattgtgctgcctgc

SEQ ID NO: 491 - DNA, 24 bp, Artificial Sequence
  Description of Artificial Sequence: Synthetic oligonucleotide
tgaatgttgaggcgggtgatgggt

SEQ ID NO: 492 - DNA, 24 bp, Artificial Sequence
  Description of Artificial Sequence: Synthetic oligonucleotide
ccagtgttccttagctcctagaaa

SEQ ID NO: 493 - DNA, 21 bp, Artificial Sequence
  Description of Artificial Sequence: Synthetic oligonucleotide
ggttcgggttcagtccctgaa

SEQ ID NO: 494 - DNA, 21 bp, Artificial Sequence
  Description of Artificial Sequence: Synthetic oligonucleotide
gtgctggtgccgagtgctcag

SEQ ID NO: 495 - DNA, 21 bp, Artificial Sequence
  Description of Artificial Sequence: Synthetic oligonucleotide
tggtcctccgggagtgctggt

SEQ ID NO: 496 - DNA, 18 bp, Artificial Sequence
  Description of Artificial Sequence: Synthetic oligonucleotide
ttcgccaaccagctgctg

SEQ ID NO: 497 - DNA, 20 bp, Artificial Sequence
  Description of Artificial Sequence: Synthetic oligonucleotide
ggtatctctagagggcaggg

SEQ ID NO: 498 - DNA, 21 bp, Artificial Sequence
  Description of Artificial Sequence: Synthetic oligonucleotide
cctggccgatgcatgaccctg

SEQ ID NO: 499 - DNA, 21 bp, Artificial Sequence
  Description of Artificial Sequence: Synthetic oligonucleotide
gagggtcggaccaaccagggt

SEQ ID NO: 500 - DNA, 24 bp, Artificial Sequence
  Description of Artificial Sequence: Synthetic oligonucleotide
tccagtgcttgttagttgctattt

SEQ ID NO: 501 - DNA, 24 bp, Artificial Sequence
  Description of Artificial Sequence: Synthetic oligonucleotide
aggattacggtggtaacagatact

SEQ ID NO: 502 - DNA, 24 bp, Artificial Sequence
  Description of Artificial Sequence: Synthetic oligonucleotide
ggtctctagctcatgaagttgatg

SEQ ID NO: 503 - DNA, 18 bp, Artificial Sequence
  Description of Artificial Sequence: Synthetic oligonucleotide
tctgtaccctgcggcagc

SEQ ID NO: 504 - DNA, 24 bp, Artificial Sequence
  Description of Artificial Sequence: Synthetic oligonucleotide
taggcctcaaagaagtgcaattat

SEQ ID NO: 505 - DNA, 34 bp, Artificial Sequence
  Description of Artificial Sequence: Synthetic oligonucleotide
ctagtttttttttttttttttttttttttttttt

SEQ ID NO: 506 - DNA, 45 bp, Artificial Sequence
  Description of Artificial Sequence: Synthetic primer
gaaattaatacgactcactatagggtgtatgggccgcgctaagtc

SEQ ID NO: 507 - DNA, 20 bp, Artificial Sequence
  Description of Artificial Sequence: Synthetic primer
gcatagttgcgaccggcttg

SEQ ID NO: 508 - DNA, 25 bp, Artificial Sequence
  Description of Artificial Sequence: Synthetic primer
gaaattaatacgactcactataggg

SEQ ID NO: 509 - DNA, 22 bp, Artificial Sequence
  Description of Artificial Sequence: Synthetic primer
caaaacagcatagctctaaaac

SEQ ID NO: 510 - DNA, 19 bp, Artificial Sequence
  Description of Artificial Sequence: Synthetic probe
gtatgccgagcggttcagt

SEQ ID NO: 511 - DNA, 19 bp, Artificial Sequence
  Description of Artificial Sequence: Synthetic probe
gccggttcgtcaagtagca

SEQ ID NO: 512 - DNA, 74 bp, Artificial Sequence
  Description of Artificial Sequence: Synthetic oligonucleotide
gaaattaatacgactcactatagggatgaatatcagtaaacactgaaccccagttttagagctatgctgttttg

SEQ ID NO: 513 - DNA, 74 bp, Artificial Sequence
  Description of Artificial Sequence: Synthetic oligonucleotide
gaaattaatacgactcactatagggatgaatagtaggggtgttggttcacacgttttagagctatgctgttttg

SEQ ID NO: 514 - DNA, 74 bp, Artificial Sequence
  Description of Artificial Sequence: Synthetic oligonucleotide
gaaattaatacgactcactatagggatgaataggttaacactgagtgtcaacgttttagagctatgctgttttg

SEQ ID NO: 515 - DNA, 74 bp, Artificial Sequence
  Description of Artificial Sequence: Synthetic oligonucleotide
gaaattaatacgactcactatagggatgaatatatcctgctgatctatgtgcgttttagagctatgctgttttg

SEQ ID NO: 516 - DNA, 74 bp, Artificial Sequence
  Description of Artificial Sequence: Synthetic oligonucleotide
gaaattaatacgactcactatagggatgaataaatttgaggtgtcttaaaaagttttagagctatgctgttttg

SEQ ID NO: 517 - DNA, 74 bp, Artificial Sequence
  Description of Artificial Sequence: Synthetic oligonucleotide
gaaattaatacgactcactatagggatgaataggggaagtggttaaagagaggttttagagctatgctgttttg

SEQ ID NO: 518 - DNA, 74 bp, Artificial Sequence
  Description of Artificial Sequence: Synthetic oligonucleotide
gaaattaatacgactcactatagggatgaatatcagaggcttcgcagacacggttttagagctatgctgttttg

SEQ ID NO: 519 - DNA, 74 bp, Artificial Sequence
  Description of Artificial Sequence: Synthetic oligonucleotide
gaaattaatacgactcactatagggatgaatatttctgttgtttaagcctccgttttagagctatgctgttttg

SEQ ID NO: 520 - DNA, 74 bp, Artificial Sequence
  Description of Artificial Sequence: Synthetic oligonucleotide
gaaattaatacgactcactatagggatgaatataacaccaggtatagagggagttttagagctatgctgttttg

SEQ ID NO: 521 - DNA, 74 bp, Artificial Sequence
  Description of Artificial Sequence: Synthetic oligonucleotide
gaaattaatacgactcactatagggatgaatagatttcacacatgtgcaaccgttttagagctatgctgttttg

SEQ ID NO: 522 - DNA, 74 bp, Artificial Sequence
  Description of Artificial Sequence: Synthetic oligonucleotide
gaaattaatacgactcactatagggatgaatacagcttcctggtctctgcacgttttagagctatgctgttttg

SEQ ID NO: 523 - DNA, 74 bp, Artificial Sequence
  Description of Artificial Sequence: Synthetic oligonucleotide
gaaattaatacgactcactatagggatgaataaagtgtctggtactagccacgttttagagctatgctgttttg

SEQ ID NO: 524 - DNA, 74 bp, Artificial Sequence
  Description of Artificial Sequence: Synthetic oligonucleotide
gaaattaatacgactcactatagggatgaataaaggaacacgctttctcaaagttttagagctatgctgttttg

SEQ ID NO: 525 - DNA, 74 bp, Artificial Sequence
  Description of Artificial Sequence: Synthetic oligonucleotide
gaaattaatacgactcactatagggatgaatatgatttcaagtccctcctgcgttttagagctatgctgttttg

SEQ ID NO: 526 - DNA, 74 bp, Artificial Sequence
  Description of Artificial Sequence: Synthetic oligonucleotide
gaaattaatacgactcactatagggatgaatatctagcctttaaaacaaggggttttagagctatgctgttttg

SEQ ID NO: 527 - DNA, 74 bp, Artificial Sequence
  Description of Artificial Sequence: Synthetic oligonucleotide
gaaattaatacgactcactatagggatgaatataaaatagagtgaggaaaccgttttagagctatgctgttttg

SEQ ID NO: 528 - DNA, 74 bp, Artificial Sequence
  Description of Artificial Sequence: Synthetic oligonucleotide
gaaattaatacgactcactatagggatgaataaatagttttggaagccaagggttttagagctatgctgttttg

SEQ ID NO: 529 - DNA, 74 bp, Artificial Sequence
  Description of Artificial Sequence: Synthetic oligonucleotide
gaaattaatacgactcactatagggatgaatatgatattttgaatgaggacagttttagagctatgctgttttg

SEQ ID NO: 530 - DNA, 74 bp, Artificial Sequence
  Description of Artificial Sequence: Synthetic oligonucleotide
gaaattaatacgactcactatagggatgaatagaggaatttccatcctaaaagttttagagctatgctgttttg

SEQ ID NO: 531 - DNA, 74 bp, Artificial Sequence
  Description of Artificial Sequence: Synthetic oligonucleotide
gaaattaatacgactcactatagggatgaatagggttaaaaagtttgaaaaggttttagagctatgctgttttg

SEQ ID NO: 532 - DNA, 74 bp, Artificial Sequence
  Description of Artificial Sequence: Synthetic oligonucleotide
gaaattaatacgactcactatagggatgaatacagtataagcccactgctacgttttagagctatgctgttttg

SEQ ID NO: 533 - DNA, 74 bp, Artificial Sequence
  Description of Artificial Sequence: Synthetic oligonucleotide
gaaattaatacgactcactatagggatgaatagtgagtcagggcagctacaggttttagagctatgctgttttg

SEQ ID NO: 534 - DNA, 74 bp, Artificial Sequence
  Description of Artificial Sequence: Synthetic oligonucleotide
gaaattaatacgactcactatagggatgaatagattgcaggcttcaacatgcgttttagagctatgctgttttg

SEQ ID NO: 535 - DNA, 74 bp, Artificial Sequence
  Description of Artificial Sequence: Synthetic oligonucleotide
gaaattaatacgactcactatagggatgaatatcacatggtagaaggggcaagttttagagctatgctgttttg

SEQ ID NO: 536 - DNA, 74 bp, Artificial Sequence
  Description of Artificial Sequence: Synthetic oligonucleotide
gaaattaatacgactcactatagggatgaataatttggtgtctggtgaggacgttttagagctatgctgttttg

SEQ ID NO: 537 - DNA, 74 bp, Artificial Sequence
  Description of Artificial Sequence: Synthetic oligonucleotide
gaaattaatacgactcactatagggatgaatatttctcatggttctggaggcgttttagagctatgctgttttg

SEQ ID NO: 538 - DNA, 74 bp, Artificial Sequence
  Description of Artificial Sequence: Synthetic oligonucleotide
gaaattaatacgactcactatagggatgaatatttttatacattttaaacacgttttagagctatgctgttttg

SEQ ID NO: 539 - DNA, 74 bp, Artificial Sequence
  Description of Artificial Sequence: Synthetic oligonucleotide
gaaattaatacgactcactatagggatgaatagaaacaaaaatcaagcaagggttttagagctatgctgttttg

SEQ ID NO: 540 - DNA, 74 bp, Artificial Sequence
  Description of Artificial Sequence: Synthetic oligonucleotide
gaaattaatacgactcactatagggatgaataaaacattcagacagacagaagttttagagctatgctgttttg

SEQ ID NO: 541 - DNA, 74 bp, Artificial Sequence
  Description of Artificial Sequence: Synthetic oligonucleotide
gaaattaatacgactcactatagggatgaatatattagaagatgcgtaataagttttagagctatgctgttttg

SEQ ID NO: 542 - DNA, 74 bp, Artificial Sequence
  Description of Artificial Sequence: Synthetic oligonucleotide
gaaattaatacgactcactatagggatgaatagtatacgttcaatgagatgagttttagagctatgctgttttg

SEQ ID NO: 543 - DNA, 74 bp, Artificial Sequence
  Description of Artificial Sequence: Synthetic oligonucleotide
gaaattaatacgactcactatagggatgaatacagcatgagaaaaattaggagttttagagctatgctgttttg

SEQ ID NO: 544 - DNA, 74 bp, Artificial Sequence
  Description of Artificial Sequence: Synthetic oligonucleotide
gaaattaatacgactcactatagggatgaataaagagatggagacaacctcagttttagagctatgctgttttg

SEQ ID NO: 545 - DNA, 74 bp, Artificial Sequence
  Description of Artificial Sequence: Synthetic oligonucleotide
gaaattaatacgactcactatagggatgaatagggccatggggtcatccagcgttttagagctatgctgttttg

SEQ ID NO: 546 - DNA, 74 bp, Artificial Sequence
  Description of Artificial Sequence: Synthetic oligonucleotide
gaaattaatacgactcactatagggatgaatatgtgtgtgtattttgagagagttttagagctatgctgttttg

SEQ ID NO: 547 - DNA, 74 bp, Artificial Sequence
  Description of Artificial Sequence: Synthetic oligonucleotide
gaaattaatacgactcactatagggatgaatagagctaaccatgaaacatccgttttagagctatgctgttttg

SEQ ID NO: 548 - DNA, 74 bp, Artificial Sequence
  Description of Artificial Sequence: Synthetic oligonucleotide
gaaattaatacgactcactatagggatgaataaggttgttgaaattgagcaagttttagagctatgctgttttg

SEQ ID NO: 549 - DNA, 74 bp, Artificial Sequence
  Description of Artificial Sequence: Synthetic oligonucleotide
gaaattaatacgactcactatagggatgaataatgtgatggattcccgccaagttttagagctatgctgttttg

SEQ ID NO: 550 - DNA, 74 bp, Artificial Sequence
  Description of Artificial Sequence: Synthetic oligonucleotide
gaaattaatacgactcactatagggatgaatacaactgccctgaggcagaaggttttagagctatgctgttttg

SEQ ID NO: 551 - DNA, 74 bp, Artificial Sequence
  Description of Artificial Sequence: Synthetic oligonucleotide
gaaattaatacgactcactatagggatgaatatagggagctttgggaaaacagttttagagctatgctgttttg

SEQ ID NO: 552 - DNA, 74 bp, Artificial Sequence
  Description of Artificial Sequence: Synthetic oligonucleotide
gaaattaatacgactcactatagggatgaatattaggagccttggaaaaacagttttagagctatgctgttttg

SEQ ID NO: 553 - DNA, 74 bp, Artificial Sequence
  Description of Artificial Sequence: Synthetic oligonucleotide
gaaattaatacgactcactatagggatgaatagagattattctggataaggagttttagagctatgctgttttg

SEQ ID NO: 554 - DNA, 74 bp, Artificial Sequence
  Description of Artificial Sequence: Synthetic oligonucleotide
gaaattaatacgactcactatagggatgaatagtttcatttggggttgaacggttttagagctatgctgttttg

SEQ ID NO: 555 - DNA, 74 bp, Artificial Sequence
  Description of Artificial Sequence: Synthetic oligonucleotide
gaaattaatacgactcactatagggatgaatagatctacaattgttgggaaagttttagagctatgctgttttg

SEQ ID NO: 556 - DNA, 74 bp, Artificial Sequence
  Description of Artificial Sequence: Synthetic oligonucleotide
gaaattaatacgactcactatagggatgaatacggggtttgtaagggaagccgttttagagctatgctgttttg

SEQ ID NO: 557 - DNA, 74 bp, Artificial Sequence
  Description of Artificial Sequence: Synthetic oligonucleotide
gaaattaatacgactcactatagggatgaatacatgccacacagagagatgcgttttagagctatgctgttttg

SEQ ID NO: 558 - DNA, 74 bp, Artificial Sequence
  Description of Artificial Sequence: Synthetic oligonucleotide
gaaattaatacgactcactatagggatgaatacggtcatctacacccggcccgttttagagctatgctgttttg

SEQ ID NO: 559 - DNA, 74 bp, Artificial Sequence
  Description of Artificial Sequence: Synthetic oligonucleotide
gaaattaatacgactcactatagggatgaatactatgtatgcaggatggagagttttagagctatgctgttttg

SEQ ID NO: 560 - DNA, 74 bp, Artificial Sequence
  Description of Artificial Sequence: Synthetic oligonucleotide
gaaattaatacgactcactatagggatgaatatctctcctcggtggacgccggttttagagctatgctgttttg

SEQ ID NO: 561 - DNA, 74 bp, Artificial Sequence
  Description of Artificial Sequence: Synthetic oligonucleotide
gaaattaatacgactcactatagggatgaataaatggcaccgatctgcagaggttttagagctatgctgttttg

SEQ ID NO: 562 - DNA, 74 bp, Artificial Sequence
  Description of Artificial Sequence: Synthetic oligonucleotide
gaaattaatacgactcactatagggatgaatacgagaagatcacggccatgggttttagagctatgctgttttg

SEQ ID NO: 563 - DNA, 74 bp, Artificial Sequence
  Description of Artificial Sequence: Synthetic oligonucleotide
gaaattaatacgactcactatagggatgaatagcaacgagggaggggaggccgttttagagctatgctgttttg

SEQ ID NO: 564 - DNA, 74 bp, Artificial Sequence
  Description of Artificial Sequence: Synthetic oligonucleotide
gaaattaatacgactcactatagggatgaatacggatcactgtccatggcaagttttagagctatgctgttttg

SEQ ID NO: 565 - DNA, 74 bp, Artificial Sequence
  Description of Artificial Sequence: Synthetic oligonucleotide
gaaattaatacgactcactatagggatgaatatgaaggcatccccaccccgagttttagagctatgctgttttg

SEQ ID NO: 566 - DNA, 74 bp, Artificial Sequence
  Description of Artificial Sequence: Synthetic oligonucleotide
gaaattaatacgactcactatagggatgaataggtcaggaacagcgcgggaggttttagagctatgctgttttg

SEQ ID NO: 567 - DNA, 74 bp, Artificial Sequence
  Description of Artificial Sequence: Synthetic oligonucleotide
gaaattaatacgactcactatagggatgaataaagtggactgtgtggccaccgttttagagctatgctgttttg

SEQ ID NO: 568 - DNA, 74 bp, Artificial Sequence
  Description of Artificial Sequence: Synthetic oligonucleotide
gaaattaatacgactcactatagggatgaataagtggatgtggtgatgaaacgttttagagctatgctgttttg

SEQ ID NO: 569 - DNA, 74 bp, Artificial Sequence
  Description of Artificial Sequence: Synthetic oligonucleotide
gaaattaatacgactcactatagggatgaatatctgatgacaactgggctaggttttagagctatgctgttttg

SEQ ID NO: 570 - DNA, 74 bp, Artificial Sequence
  Description of Artificial Sequence: Synthetic oligonucleotide
gaaattaatacgactcactatagggatgaatagtgcgctgggtgctcggggagttttagagctatgctgttttg

SEQ ID NO: 571 - DNA, 74 bp, Artificial Sequence
  Description of Artificial Sequence: Synthetic oligonucleotide
gaaattaatacgactcactatagggatgaataggagaacatctcgctgccccgttttagagctatgctgttttg

SEQ ID NO: 572 - DNA, 74 bp, Artificial Sequence
  Description of Artificial Sequence: Synthetic oligonucleotide
gaaattaatacgactcactatagggatgaatacgtggccagcaatgcagccggttttagagctatgctgttttg

SEQ ID NO: 573 - DNA, 74 bp, Artificial Sequence
  Description of Artificial Sequence: Synthetic oligonucleotide
gaaattaatacgactcactatagggatgaatagcatcaccctgcacgaaaacgttttagagctatgctgttttg

SEQ ID NO: 574 - DNA, 74 bp, Artificial Sequence
  Description of Artificial Sequence: Synthetic oligonucleotide
gaaattaatacgactcactatagggatgaataggatgaagggggctcgggcagttttagagctatgctgttttg

SEQ ID NO: 575 - DNA, 74 bp, Artificial Sequence
  Description of Artificial Sequence: Synthetic oligonucleotide
gaaattaatacgactcactatagggatgaatatctggcttgccatccaaaaggttttagagctatgctgttttg

SEQ ID NO: 576 - DNA, 74 bp, Artificial Sequence
  Description of Artificial Sequence: Synthetic oligonucleotide
gaaattaatacgactcactatagggatgaatatgacaattggcaagaacccagttttagagctatgctgttttg

SEQ ID NO: 577 - DNA, 74 bp, Artificial Sequence
  Description of Artificial Sequence: Synthetic oligonucleotide
gaaattaatacgactcactatagggatgaatagagggatgaaatggaccgcagttttagagctatgctgttttg

SEQ ID NO: 578 - DNA, 74 bp, Artificial Sequence
  Description of Artificial Sequence: Synthetic oligonucleotide
gaaattaatacgactcactatagggatgaataaagttctccattctcagcaggttttagagctatgctgttttg

SEQ ID NO: 579 - DNA, 74 bp, Artificial Sequence
  Description of Artificial Sequence: Synthetic oligonucleotide
gaaattaatacgactcactatagggatgaatagatcagactgtcctggaagggttttagagctatgctgttttg

SEQ ID NO: 580 - DNA, 74 bp, Artificial Sequence
  Description of Artificial Sequence: Synthetic oligonucleotide
gaaattaatacgactcactatagggatgaataacgtcagagtacggccaagagttttagagctatgctgttttg

SEQ ID NO: 581 - DNA, 74 bp, Artificial Sequence
  Description of Artificial Sequence: Synthetic oligonucleotide
gaaattaatacgactcactatagggatgaatagaggaagctctttactacacgttttagagctatgctgttttg

SEQ ID NO: 582 - DNA, 74 bp, Artificial Sequence
  Description of Artificial Sequence: Synthetic oligonucleotide
gaaattaatacgactcactatagggatgaataaggggcttaggctcaagtcagttttagagctatgctgttttg

SEQ ID NO: 583 - DNA, 74 bp, Artificial Sequence
  Description of Artificial Sequence: Synthetic oligonucleotide
gaaattaatacgactcactatagggatgaatatggtagtcatcactggcggggttttagagctatgctgttttg

SEQ ID NO: 584 - DNA, 74 bp, Artificial Sequence
  Description of Artificial Sequence: Synthetic oligonucleotide
gaaattaatacgactcactatagggatgaatacaggagggcaaaaggaaagagttttagagctatgctgttttg

SEQ ID NO: 585 - DNA, 74 bp, Artificial Sequence
  Description of Artificial Sequence: Synthetic oligonucleotide
gaaattaatacgactcactatagggatgaatacatgaaattcagctggccaagttttagagctatgctgttttg

SEQ ID NO: 586 - DNA, 74 bp, Artificial Sequence
  Description of Artificial Sequence: Synthetic oligonucleotide
gaaattaatacgactcactatagggatgaatagagcaggctggtgagaggaggttttagagctatgctgttttg

SEQ ID NO: 587 - DNA, 74 bp, Artificial Sequence
  Description of Artificial Sequence: Synthetic oligonucleotide
gaaattaatacgactcactatagggatgaatattaatgtgggaaactgggacgttttagagctatgctgttttg

SEQ ID NO: 588 - DNA, 74 bp, Artificial Sequence
  Description of Artificial Sequence: Synthetic oligonucleotide
gaaattaatacgactcactatagggatgaatatcatgtaatcagttacatacgttttagagctatgctgttttg

SEQ ID NO: 589 - DNA, 74 bp, Artificial Sequence
  Description of Artificial Sequence: Synthetic oligonucleotide
gaaattaatacgactcactatagggatgaatagagcacccaatcagctagacgttttagagctatgctgttttg

SEQ ID NO: 590 - DNA, 74 bp, Artificial Sequence
  Description of Artificial Sequence: Synthetic oligonucleotide
gaaattaatacgactcactatagggatgaatacctctacttagcagagaacagttttagagctatgctgttttg

SEQ ID NO: 591 - DNA, 74 bp, Artificial Sequence
  Description of Artificial Sequence: Synthetic oligonucleotide
gaaattaatacgactcactatagggatgaatatgaattctaaatcctactgagttttagagctatgctgttttg

SEQ ID NO: 592 - DNA, 74 bp, Artificial Sequence
  Description of Artificial Sequence: Synthetic oligonucleotide
gaaattaatacgactcactatagggatgaatacaaagcaaattccaatgccggttttagagctatgctgttttg

SEQ ID NO: 593 - DNA, 74 bp, Artificial Sequence
  Description of Artificial Sequence: Synthetic oligonucleotide
gaaattaatacgactcactatagggatgaatactttgatcatccgtcagacagttttagagctatgctgttttg

SEQ ID NO: 594 - DNA, 74 bp, Artificial Sequence
  Description of Artificial Sequence: Synthetic oligonucleotide
gaaattaatacgactcactatagggatgaataaaagtaatacaaagaggacagttttagagctatgctgttttg

SEQ ID NO: 595 - DNA, 74 bp, Artificial Sequence
  Description of Artificial Sequence: Synthetic oligonucleotide
gaaattaatacgactcactatagggatgaatatgaatcaatgtgggttgtaggttttagagctatgctgttttg

SEQ ID NO: 596 - DNA, 74 bp, Artificial Sequence
  Description of Artificial Sequence: Synthetic oligonucleotide
gaaattaatacgactcactatagggatgaatagatagatagatacagacagagttttagagctatgctgttttg

SEQ ID NO: 597 - DNA, 74 bp, Artificial Sequence
  Description of Artificial Sequence: Synthetic oligonucleotide
gaaattaatacgactcactatagggatgaataatacccttgggttctgagaggttttagagctatgctgttttg

SEQ ID NO: 598 - DNA, 74 bp, Artificial Sequence
  Description of Artificial Sequence: Synthetic oligonucleotide
gaaattaatacgactcactatagggatgaatacatagaactgcactttatgcgttttagagctatgctgttttg

SEQ ID NO: 599 - DNA, 74 bp, Artificial Sequence
  Description of Artificial Sequence: Synthetic oligonucleotide
gaaattaatacgactcactatagggatgaatactttcttctagccaaaaacagttttagagctatgctgttttg

SEQ ID NO: 600 - DNA, 74 bp, Artificial Sequence
  Description of Artificial Sequence: Synthetic oligonucleotide
gaaattaatacgactcactatagggatgaataattattcacagggtctgtaggttttagagctatgctgttttg

SEQ ID NO: 601 - DNA, 74 bp, Artificial Sequence
  Description of Artificial Sequence: Synthetic oligonucleotide
gaaattaatacgactcactatagggatgaataatagtaggttagagaagaaagttttagagctatgctgttttg

SEQ ID NO: 602 - DNA, 74 bp, Artificial Sequence
  Description of Artificial Sequence: Synthetic oligonucleotide
gaaattaatacgactcactatagggatgaatatctactgtatcgtgcagccggttttagagctatgctgttttg

SEQ ID NO: 603 - DNA, 74 bp, Artificial Sequence
  Description of Artificial Sequence: Synthetic oligonucleotide
gaaattaatacgactcactatagggatgaatacaatccttgctggacacgaggttttagagctatgctgttttg

SEQ ID NO: 604 - DNA, 74 bp, Artificial Sequence
  Description of Artificial Sequence: Synthetic oligonucleotide
gaaattaatacgactcactatagggatgaatagcacgtctttgtttttcccagttttagagctatgctgttttg

SEQ ID NO: 605 - DNA, 74 bp, Artificial Sequence
  Description of Artificial Sequence: Synthetic oligonucleotide
gaaattaatacgactcactatagggatgaatagcttctccaaggatctgtcggttttagagctatgctgttttg

SEQ ID NO: 606 - DNA, 74 bp, Artificial Sequence
  Description of Artificial Sequence: Synthetic oligonucleotide
gaaattaatacgactcactatagggatgaatatagcattgagctctgtctgggttttagagctatgctgttttg

SEQ ID NO: 607 - DNA, 74 bp, Artificial Sequence
  Description of Artificial Sequence: Synthetic oligonucleotide
gaaattaatacgactcactatagggatgaatatggtggccagcattggctgggttttagagctatgctgttttg

SEQ ID NO: 608 - DNA, 74 bp, Artificial Sequence
  Description of Artificial Sequence: Synthetic oligonucleotide
gaaattaatacgactcactatagggatgaatacttctcatttccttgaccacgttttagagctatgctgttttg

SEQ ID NO: 609 - DNA, 74 bp, Artificial Sequence
  Description of Artificial Sequence: Synthetic oligonucleotide
gaaattaatacgactcactatagggatgaatacaatcccatgctctgggtccgttttagagctatgctgttttg

SEQ ID NO: 610 - DNA, 74 bp, Artificial Sequence
  Description of Artificial Sequence: Synthetic oligonucleotide
gaaattaatacgactcactatagggatgaatatcaggaggactcacgcagaagttttagagctatgctgttttg

SEQ ID NO: 611 - DNA, 74 bp, Artificial Sequence
  Description of Artificial Sequence: Synthetic oligonucleotide
gaaattaatacgactcactatagggatgaatagttctaagccagtatgaccagttttagagctatgctgttttg

SEQ ID NO: 612 - DNA, 74 bp, Artificial Sequence
  Description of Artificial Sequence: Synthetic oligonucleotide
gaaattaatacgactcactatagggatgaatatgagaactcactctgtgtgagttttagagctatgctgttttg

SEQ ID NO: 613 - DNA, 74 bp, Artificial Sequence
  Description of Artificial Sequence: Synthetic oligonucleotide
gaaattaatacgactcactatagggatgaatacaatatgtctctctgagccagttttagagctatgctgttttg

SEQ ID NO: 614 - DNA, 74 bp, Artificial Sequence
  Description of Artificial Sequence: Synthetic oligonucleotide
gaaattaatacgactcactatagggatgaatagttccttcacatcattataagttttagagctatgctgttttg

SEQ ID NO: 615 - DNA, 74 bp, Artificial Sequence
  Description of Artificial Sequence: Synthetic oligonucleotide
gaaattaatacgactcactatagggatgaatagattactgagtcctggatgggttttagagctatgctgttttg

SEQ ID NO: 616 - DNA, 74 bp, Artificial Sequence
  Description of Artificial Sequence: Synthetic oligonucleotide
gaaattaatacgactcactatagggatgaatagcttccctaactccctgaaggttttagagctatgctgttttg

SEQ ID NO: 617 - DNA, 74 bp, Artificial Sequence
  Description of Artificial Sequence: Synthetic oligonucleotide
gaaattaatacgactcactatagggatgaatatggctttaaacctgttctgagttttagagctatgctgttttg

SEQ ID NO: 618 - DNA, 74 bp, Artificial Sequence
  Description of Artificial Sequence: Synthetic oligonucleotide
gaaattaatacgactcactatagggatgaataagtaggtttgggggatgcgggttttagagctatgctgttttg

SEQ ID NO: 619 - DNA, 74 bp, Artificial Sequence
  Description of Artificial Sequence: Synthetic oligonucleotide
gaaattaatacgactcactatagggatgaatagcacctcattacaattggacgttttagagctatgctgttttg

SEQ ID NO: 620 - DNA, 74 bp, Artificial Sequence
  Description of Artificial Sequence: Synthetic oligonucleotide
gaaattaatacgactcactatagggatgaatatgatttctttccaagccagggttttagagctatgctgttttg

SEQ ID NO: 621 - DNA, 74 bp, Artificial Sequence
  Description of Artificial Sequence: Synthetic oligonucleotide
gaaattaatacgactcactatagggatgaatatatcttgtaggatggacgacgttttagagctatgctgttttg

SEQ ID NO: 622 - DNA, 74 bp, Artificial Sequence
  Description of Artificial Sequence: Synthetic oligonucleotide
gaaattaatacgactcactatagggatgaatagtaagtcacagtttctatccgttttagagctatgctgttttg

SEQ ID NO: 623 - DNA, 74 bp, Artificial Sequence
  Description of Artificial Sequence: Synthetic oligonucleotide
gaaattaatacgactcactatagggatgaatatcttcccaagtccaacctccgttttagagctatgctgttttg

SEQ ID NO: 624 - DNA, 74 bp, Artificial Sequence
  Description of Artificial Sequence: Synthetic oligonucleotide
gaaattaatacgactcactatagggatgaatatttctggccacctcctgtgcgttttagagctatgctgttttg

SEQ ID NO: 625 - DNA, 74 bp, Artificial Sequence
  Description of Artificial Sequence: Synthetic oligonucleotide
gaaattaatacgactcactatagggatgaataacaatcctgtaccttcatcagttttagagctatgctgttttg

SEQ ID NO: 626 - DNA, 74 bp, Artificial Sequence
  Description of Artificial Sequence: Synthetic oligonucleotide
gaaattaatacgactcactatagggatgaatataagcacaaccaagcccagcgttttagagctatgctgttttg

SEQ ID NO: 627 - DNA, 74 bp, Artificial Sequence
  Description of Artificial Sequence: Synthetic oligonucleotide
gaaattaatacgactcactatagggatgaatatagattccaccctaagcccagttttagagctatgctgttttg

SEQ ID NO: 628 - DNA, 74 bp, Artificial Sequence
  Description of Artificial Sequence: Synthetic oligonucleotide
gaaattaatacgactcactatagggatgaataggaaggtgggagagtacaaagttttagagctatgctgttttg

SEQ ID NO: 629 - DNA, 74 bp, Artificial Sequence
  Description of Artificial Sequence: Synthetic oligonucleotide
gaaattaatacgactcactatagggatgaatacctcccatccctgagaacacgttttagagctatgctgttttg

SEQ ID NO: 630 - DNA, 74 bp, Artificial Sequence
  Description of Artificial Sequence: Synthetic oligonucleotide
gaaattaatacgactcactatagggatgaatagcatgaattgcctcccaccagttttagagctatgctgttttg

SEQ ID NO: 631 - DNA, 74 bp, Artificial Sequence
  Description of Artificial Sequence: Synthetic oligonucleotide
gaaattaatacgactcactatagggatgaatataggagaatcgcatgaggccgttttagagctatgctgttttg

SEQ ID NO: 632 - DNA, 74 bp, Artificial Sequence
  Description of Artificial Sequence: Synthetic oligonucleotide
gaaattaatacgactcactatagggatgaatagctcatgagtggctgtgtcagttttagagctatgctgttttg

SEQ ID NO: 633 - DNA, 74 bp, Artificial Sequence
  Description of Artificial Sequence: Synthetic oligonucleotide
gaaattaatacgactcactatagggatgaatagcaattcctacagacacacagttttagagctatgctgttttg

SEQ ID NO: 634 - DNA, 74 bp, Artificial Sequence
  Description of Artificial Sequence: Synthetic oligonucleotide
gaaattaatacgactcactatagggatgaataagagccacaagaggtgaagcgttttagagctatgctgttttg

SEQ ID NO: 635 - DNA, 74 bp, Artificial Sequence
  Description of Artificial Sequence: Synthetic oligonucleotide
gaaattaatacgactcactatagggatgaatagggaaagggaagcatgacccgttttagagctatgctgttttg

SEQ ID NO: 636 - DNA, 74 bp, Artificial Sequence
  Description of Artificial Sequence: Synthetic oligonucleotide
gaaattaatacgactcactatagggatgaataggaactctcttaccagctgcgttttagagctatgctgttttg

SEQ ID NO: 637 - DNA, 74 bp, Artificial Sequence
  Description of Artificial Sequence: Synthetic oligonucleotide
gaaattaatacgactcactatagggatgaatacagataaagagataacgggggttttagagctatgctgttttg

SEQ ID NO: 638 - DNA, 74 bp, Artificial Sequence
  Description of Artificial Sequence: Synthetic oligonucleotide
gaaattaatacgactcactatagggatgaatatttgtagggagaatgacagggttttagagctatgctgttttg

SEQ ID NO: 639 - DNA, 74 bp, Artificial Sequence
  Description of Artificial Sequence: Synthetic oligonucleotide
gaaattaatacgactcactatagggatgaatattggatcctgttaaaacagggttttagagctatgctgttttg

SEQ ID NO: 640 - DNA, 74 bp, Artificial Sequence
  Description of Artificial Sequence: Synthetic oligonucleotide
gaaattaatacgactcactatagggatgaataagattgattaagaggagaaggttttagagctatgctgttttg

SEQ ID NO: 641 - DNA, 74 bp, Artificial Sequence
  Description of Artificial Sequence: Synthetic oligonucleotide
gaaattaatacgactcactatagggatgaataatatgtacacatatatacgagttttagagctatgctgttttg

SEQ ID NO: 642 - DNA, 74 bp, Artificial Sequence
  Description of Artificial Sequence: Synthetic oligonucleotide
gaaattaatacgactcactatagggatgaatagcaatttttccaaggagcccgttttagagctatgctgttttg

SEQ ID NO: 643 - DNA, 74 bp, Artificial Sequence
  Description of Artificial Sequence: Synthetic oligonucleotide
gaaattaatacgactcactatagggatgaataagttgatcctgaaattcacagttttagagctatgctgttttg

SEQ ID NO: 644 - DNA, 74 bp, Artificial Sequence
  Description of Artificial Sequence: Synthetic oligonucleotide
gaaattaatacgactcactatagggatgaatagaagattgtatttgacaggggttttagagctatgctgttttg

SEQ ID NO: 645 - DNA, 74 bp, Artificial Sequence
  Description of Artificial Sequence: Synthetic oligonucleotide
gaaattaatacgactcactatagggatgaataaggaaggaaggaaggaaggagttttagagctatgctgttttg

SEQ ID NO: 646 - DNA, 74 bp, Artificial Sequence
  Description of Artificial Sequence: Synthetic oligonucleotide
gaaattaatacgactcactatagggatgaatatgtagtgctagccactcagggttttagagctatgctgttttg

SEQ ID NO: 647 - DNA, 74 bp, Artificial Sequence
  Description of Artificial Sequence: Synthetic oligonucleotide
gaaattaatacgactcactatagggatgaataaaaaaaatacagcaacgtacgttttagagctatgctgttttg

SEQ ID NO: 648 - DNA, 74 bp, Artificial Sequence
  Description of Artificial Sequence: Synthetic oligonucleotide
gaaattaatacgactcactatagggatgaataaaaatattagtggcatctgagttttagagctatgctgttttg

SEQ ID NO: 649 - DNA, 74 bp, Artificial Sequence
  Description of Artificial Sequence: Synthetic oligonucleotide
gaaattaatacgactcactatagggatgaatacagagagtaaacttaggaacgttttagagctatgctgttttg

SEQ ID NO: 650 - DNA, 74 bp, Artificial Sequence
  Description of Artificial Sequence: Synthetic oligonucleotide
gaaattaatacgactcactatagggatgaatataagaacatgccagaccaaggttttagagctatgctgttttg

SEQ ID NO: 651 - DNA, 74 bp, Artificial Sequence
  Description of Artificial Sequence: Synthetic oligonucleotide
gaaattaatacgactcactatagggatgaatacaggagcgcaccttaaccccgttttagagctatgctgttttg

SEQ ID NO: 652 - DNA, 74 bp, Artificial Sequence
  Description of Artificial Sequence: Synthetic oligonucleotide
gaaattaatacgactcactatagggatgaataacacccacacacatcacagagttttagagctatgctgttttg

SEQ ID NO: 653 - DNA, 74 bp, Artificial Sequence
  Description of Artificial Sequence: Synthetic oligonucleotide
gaaattaatacgactcactatagggatgaatagagggcagagcccacaggaagttttagagctatgctgttttg

SEQ ID NO: 654 - DNA, 74 bp, Artificial Sequence
  Description of Artificial Sequence: Synthetic oligonucleotide
gaaattaatacgactcactatagggatgaataacttctatgttgcaggctgggttttagagctatgctgttttg

SEQ ID NO: 655 - DNA, 74 bp, Artificial Sequence
  Description of Artificial Sequence: Synthetic oligonucleotide
gaaattaatacgactcactatagggatgaatatcatctggtcaaaggagtaagttttagagctatgctgttttg

SEQ ID NO: 656 - DNA, 74 bp, Artificial Sequence
  Description of Artificial Sequence: Synthetic oligonucleotide
gaaattaatacgactcactatagggatgaataattttcacaggtctggaggcgttttagagctatgctgttttg

SEQ ID NO: 657 - DNA, 74 bp, Artificial Sequence
  Description of Artificial Sequence: Synthetic oligonucleotide
gaaattaatacgactcactatagggatgaatatctgcagttcttcattaccagttttagagctatgctgttttg

SEQ ID NO: 658 - DNA, 74 bp, Artificial Sequence
  Description of Artificial Sequence: Synthetic oligonucleotide
gaaattaatacgactcactatagggatgaatagttagcaggaagcagcagccgttttagagctatgctgttttg

SEQ ID NO: 659 - DNA, 74 bp, Artificial Sequence
  Description of Artificial Sequence: Synthetic oligonucleotide
gaaattaatacgactcactatagggatgaataagggagattcttggaggacggttttagagctatgctgttttg

SEQ ID NO: 660 - DNA, 74 bp, Artificial Sequence
  Description of Artificial Sequence: Synthetic oligonucleotide
gaaattaatacgactcactatagggatgaatatatcaaaaaagaatccccaagttttagagctatgctgttttg

SEQ ID NO: 661 - DNA, 74 bp, Artificial Sequence
  Description of Artificial Sequence: Synthetic oligonucleotide
gaaattaatacgactcactatagggatgaataatagtggactttttaaaaaagttttagagctatgctgttttg

SEQ ID NO: 662 - DNA, 74 bp, Artificial Sequence
  Description of Artificial Sequence: Synthetic oligonucleotide
gaaattaatacgactcactatagggatgaatacgtattttattacgtgaggagttttagagctatgctgttttg

SEQ ID NO: 663 - DNA, 74 bp, Artificial Sequence
  Description of Artificial Sequence: Synthetic oligonucleotide
gaaattaatacgactcactatagggatgaataccaaaccaccacgcacctccgttttagagctatgctgttttg

SEQ ID NO: 664 - DNA, 74 bp, Artificial Sequence
  Description of Artificial Sequence: Synthetic oligonucleotide
gaaattaatacgactcactatagggatgaatacatgtctattctttgaatgagttttagagctatgctgttttg

SEQ ID NO: 665 - DNA, 74 bp, Artificial Sequence
  Description of Artificial Sequence: Synthetic oligonucleotide
gaaattaatacgactcactatagggatgaatacagaacaacatctaagatcagttttagagctatgctgttttg

SEQ ID NO: 666 - DNA, 74 bp, Artificial Sequence
  Description of Artificial Sequence: Synthetic oligonucleotide
gaaattaatacgactcactatagggatgaataattctgcaacactgagacaagttttagagctatgctgttttg

SEQ ID NO: 667 - DNA, 74 bp, Artificial Sequence
  Description of Artificial Sequence: Synthetic oligonucleotide
gaaattaatacgactcactatagggatgaatattgactgtcttctacaaagcgttttagagctatgctgttttg

SEQ ID NO: 668 - DNA, 74 bp, Artificial Sequence
  Description of Artificial Sequence: Synthetic oligonucleotide
gaaattaatacgactcactatagggatgaatacagctacgagtaaatggtgggttttagagctatgctgttttg

SEQ ID NO: 669 - DNA, 74 bp, Artificial Sequence
  Description of Artificial Sequence: Synthetic oligonucleotide
gaaattaatacgactcactatagggatgaatagagagggcattggaaagagggttttagagctatgctgttttg

SEQ ID NO: 670 - DNA, 74 bp, Artificial Sequence
  Description of Artificial Sequence: Synthetic oligonucleotide
gaaattaatacgactcactatagggatgaataatgtagagtctccctcgtcagttttagagctatgctgttttg

SEQ ID NO: 671 - DNA, 74 bp, Artificial Sequence
  Description of Artificial Sequence: Synthetic oligonucleotide
gaaattaatacgactcactatagggatgaataaagcacaattcatatcgcacgttttagagctatgctgttttg

SEQ ID NO: 672 - DNA, 74 bp, Artificial Sequence
  Description of Artificial Sequence: Synthetic oligonucleotide
gaaattaatacgactcactatagggatgaatagttgttattgaggtccagacgttttagagctatgctgttttg

SEQ ID NO: 673 - DNA, 74 bp, Artificial Sequence
  Description of Artificial Sequence: Synthetic oligonucleotide
gaaattaatacgactcactatagggatgaatagcagatatggtcaatagaaagttttagagctatgctgttttg

SEQ ID NO: 674 - DNA, 74 bp, Artificial Sequence
  Description of Artificial Sequence: Synthetic oligonucleotide
gaaattaatacgactcactatagggatgaataaagcaattaccttggaaacagttttagagctatgctgttttg

SEQ ID NO: 675 - DNA, 74 bp, Artificial Sequence
  Description of Artificial Sequence: Synthetic oligonucleotide
gaaattaatacgactcactatagggatgaataaaaatcaaccattaggctgagttttagagctatgctgttttg

SEQ ID NO: 676 - DNA, 74 bp, Artificial Sequence
  Description of Artificial Sequence: Synthetic oligonucleotide
gaaattaatacgactcactatagggatgaatattagctggaatgtagggagcgttttagagctatgctgttttg

SEQ ID NO: 677 - DNA, 74 bp, Artificial Sequence
  Description of Artificial Sequence: Synthetic oligonucleotide
gaaattaatacgactcactatagggatgaatagaagacttgaaactctctgagttttagagctatgctgttttg

SEQ ID NO: 678 - DNA, 74 bp, Artificial Sequence
  Description of Artificial Sequence: Synthetic oligonucleotide
gaaattaatacgactcactatagggatgaatacaaaggtggaatgaatggaagttttagagctatgctgttttg

SEQ ID NO: 679 - DNA, 74 bp, Artificial Sequence
  Description of Artificial Sequence: Synthetic oligonucleotide
gaaattaatacgactcactatagggatgaatacagccaccatatagggaagagttttagagctatgctgttttg

SEQ ID NO: 680 - DNA, 74 bp, Artificial Sequence
  Description of Artificial Sequence: Synthetic oligonucleotide
gaaattaatacgactcactatagggatgaatattagctaattccagaaagcagttttagagctatgctgttttg

SEQ ID NO: 681 - DNA, 74 bp, Artificial Sequence
  Description of Artificial Sequence: Synthetic oligonucleotide
gaaattaatacgactcactatagggatgaatagagtcacttggaatttggaagttttagagctatgctgttttg

SEQ ID NO: 682 - DNA, 74 bp, Artificial Sequence
  Description of Artificial Sequence: Synthetic oligonucleotide
gaaattaatacgactcactatagggatgaataggggaggtgggaagggggaagttttagagctatgctgttttg

SEQ ID NO: 683 - DNA, 74 bp, Artificial Sequence
  Description of Artificial Sequence: Synthetic oligonucleotide
gaaattaatacgactcactatagggatgaatacagacgaagctcttatctgggttttagagctatgctgttttg

SEQ ID NO: 684 - DNA, 74 bp, Artificial Sequence
  Description of Artificial Sequence: Synthetic oligonucleotide
gaaattaatacgactcactatagggatgaataacaccccatttattagctcggttttagagctatgctgttttg

SEQ ID NO: 685 - DNA, 74 bp, Artificial Sequence
  Description of Artificial Sequence: Synthetic oligonucleotide
gaaattaatacgactcactatagggatgaataggatggtcatagagaagggagttttagagctatgctgttttg

SEQ ID NO: 686 - DNA, 74 bp, Artificial Sequence
  Description of Artificial Sequence: Synthetic oligonucleotide
gaaattaatacgactcactatagggatgaataaagaagtcagtcagagacccgttttagagctatgctgttttg

SEQ ID NO: 687 - DNA, 74 bp, Artificial Sequence
  Description of Artificial Sequence: Synthetic oligonucleotide
gaaattaatacgactcactatagggatgaataacatccagtctagattctccgttttagagctatgctgttttg

SEQ ID NO: 688 - DNA, 74 bp, Artificial Sequence
  Description of Artificial Sequence: Synthetic oligonucleotide
gaaattaatacgactcactatagggatgaatacatttgcataaattaaataggttttagagctatgctgttttg

SEQ ID NO: 689 - DNA, 74 bp, Artificial Sequence
  Description of Artificial Sequence: Synthetic oligonucleotide
gaaattaatacgactcactatagggatgaataggaatccagactaagaatacgttttagagctatgctgttttg

SEQ ID NO: 690 - DNA, 74 bp, Artificial Sequence
  Description of Artificial Sequence: Synthetic oligonucleotide
gaaattaatacgactcactatagggatgaatagggggatgttactgggaaaagttttagagctatgctgttttg

SEQ ID NO: 691 - DNA, 74 bp, Artificial Sequence
  Description of Artificial Sequence: Synthetic oligonucleotide
gaaattaatacgactcactatagggatgaatagcaggtgagtggcatgcccagttttagagctatgctgttttg

SEQ ID NO: 692 - DNA, 74 bp, Artificial Sequence
  Description of Artificial Sequence: Synthetic oligonucleotide
gaaattaatacgactcactatagggatgaatactgcagaaatgattacgaaagttttagagctatgctgttttg

SEQ ID NO: 693 - DNA, 74 bp, Artificial Sequence
  Description of Artificial Sequence: Synthetic oligonucleotide
gaaattaatacgactcactatagggatgaataggatccacttgaaaaactgagttttagagctatgctgttttg

SEQ ID NO: 694 - DNA, 74 bp, Artificial Sequence
  Description of Artificial Sequence: Synthetic oligonucleotide
gaaattaatacgactcactatagggatgaataacgtgattattaatgtgccagttttagagctatgctgttttg

SEQ ID NO: 695 - DNA, 74 bp, Artificial Sequence
  Description of Artificial Sequence: Synthetic oligonucleotide
gaaattaatacgactcactatagggatgaatagttctgagtaaacatggaaggttttagagctatgctgttttg

SEQ ID NO: 696 - DNA, 74 bp, Artificial Sequence
  Description of Artificial Sequence: Synthetic oligonucleotide
gaaattaatacgactcactatagggatgaatagcagaacaaaatgccaagaggttttagagctatgctgttttg

SEQ ID NO: 697 - DNA, 74 bp, Artificial Sequence
  Description of Artificial Sequence: Synthetic oligonucleotide
gaaattaatacgactcactatagggatgaataccattgacacaagatcaggagttttagagctatgctgttttg

SEQ ID NO: 698 - DNA, 74 bp, Artificial Sequence
  Description of Artificial Sequence: Synthetic oligonucleotide
gaaattaatacgactcactatagggatgaatagtttgattagaaaaaggtaggttttagagctatgctgttttg

SEQ ID NO: 699 - DNA, 74 bp, Artificial Sequence
  Description of Artificial Sequence: Synthetic oligonucleotide
gaaattaatacgactcactatagggatgaataccaaggtagctatggcaaccgttttagagctatgctgttttg

SEQ ID NO: 700 - DNA, 74 bp, Artificial Sequence
  Description of Artificial Sequence: Synthetic oligonucleotide
gaaattaatacgactcactatagggatgaataatagttcattcttgagctgggttttagagctatgctgttttg

SEQ ID NO: 701 - DNA, 74 bp, Artificial Sequence
  Description of Artificial Sequence: Synthetic oligonucleotide
gaaattaatacgactcactatagggatgaatagaagcctggccgaaaacaacgttttagagctatgctgttttg

SEQ ID NO: 702 - DNA, 74 bp, Artificial Sequence
  Description of Artificial Sequence: Synthetic oligonucleotide
gaaattaatacgactcactatagggatgaatatctgccctctgatcataaacgttttagagctatgctgttttg

SEQ ID NO: 703 - DNA, 74 bp, Artificial Sequence
  Description of Artificial Sequence: Synthetic oligonucleotide
gaaattaatacgactcactatagggatgaatagtgcagaaaaacacttgcgggttttagagctatgctgttttg

SEQ ID NO: 704 - DNA, 74 bp, Artificial Sequence
  Description of Artificial Sequence: Synthetic oligonucleotide
gaaattaatacgactcactatagggatgaatagaagcagagcccccttcgaagttttagagctatgctgttttg

SEQ ID NO: 705 - DNA, 74 bp, Artificial Sequence
  Description of Artificial Sequence: Synthetic oligonucleotide
gaaattaatacgactcactatagggatgaatagttagcatctgtatcgcaacgttttagagctatgctgttttg

SEQ ID NO: 706 - DNA, 74 bp, Artificial Sequence
  Description of Artificial Sequence: Synthetic oligonucleotide
gaaattaatacgactcactatagggatgaatacaattccagtttgcggccgcgttttagagctatgctgttttg

SEQ ID NO: 707 - DNA, 74 bp, Artificial Sequence
  Description of Artificial Sequence: Synthetic oligonucleotide
gaaattaatacgactcactatagggatgaataacattttacctgagccacccgttttagagctatgctgttttg

SEQ ID NO: 708 - DNA, 74 bp, Artificial Sequence
  Description of Artificial Sequence: Synthetic oligonucleotide
gaaattaatacgactcactatagggatgaatattgctgggttagcaggcgccgttttagagctatgctgttttg

SEQ ID NO: 709 - DNA, 74 bp, Artificial Sequence
  Description of Artificial Sequence: Synthetic oligonucleotide
gaaattaatacgactcactatagggatgaataccgctctgaagactgcgacggttttagagctatgctgttttg

SEQ ID NO: 710 - DNA, 74 bp, Artificial Sequence
  Description of Artificial Sequence: Synthetic oligonucleotide
gaaattaatacgactcactatagggatgaatagcaacagatcaaagaaaaaggttttagagctatgctgttttg

SEQ ID NO: 711 - DNA, 74 bp, Artificial Sequence
  Description of Artificial Sequence: Synthetic oligonucleotide
gaaattaatacgactcactatagggatgaatagatttgaaataagagccagggttttagagctatgctgttttg

SEQ ID NO: 712 - DNA, 74 bp, Artificial Sequence
  Description of Artificial Sequence: Synthetic oligonucleotide
gaaattaatacgactcactatagggatgaataccaccaaattttcacagaacgttttagagctatgctgttttg

SEQ ID NO: 713 - DNA, 74 bp, Artificial Sequence
  Description of Artificial Sequence: Synthetic oligonucleotide
gaaattaatacgactcactatagggatgaatatcaaggaaaagtacaagaaggttttagagctatgctgttttg

SEQ ID NO: 714 - DNA, 74 bp, Artificial Sequence
  Description of Artificial Sequence: Synthetic oligonucleotide
gaaattaatacgactcactatagggatgaataaaagcgtgatttcatcacccgttttagagctatgctgttttg

SEQ ID NO: 715 - DNA, 74 bp, Artificial Sequence
  Description of Artificial Sequence: Synthetic oligonucleotide
gaaattaatacgactcactatagggatgaataattattttggtgcaggggccgttttagagctatgctgttttg

SEQ ID NO: 716 - DNA, 74 bp, Artificial Sequence
  Description of Artificial Sequence: Synthetic oligonucleotide
gaaattaatacgactcactatagggatgaatagtatttaatggcaggagcccgttttagagctatgctgttttg

SEQ ID NO: 717 - DNA, 74 bp, Artificial Sequence
  Description of Artificial Sequence: Synthetic oligonucleotide
gaaattaatacgactcactatagggatgaatagagtcaaaggagaataaaaagttttagagctatgctgttttg

SEQ ID NO: 718 - DNA, 74 bp, Artificial Sequence
  Description of Artificial Sequence: Synthetic oligonucleotide
gaaattaatacgactcactatagggatgaatataagggcatagaagatggaagttttagagctatgctgttttg

SEQ ID NO: 719 - DNA, 74 bp, Artificial Sequence
  Description of Artificial Sequence: Synthetic oligonucleotide
gaaattaatacgactcactatagggatgaataactcaatgaacattctccaagttttagagctatgctgttttg

SEQ ID NO: 720 - DNA, 74 bp, Artificial Sequence
  Description of Artificial Sequence: Synthetic oligonucleotide
gaaattaatacgactcactatagggatgaatatggagagccctgactgatacgttttagagctatgctgttttg

SEQ ID NO: 721 - DNA, 74 bp, Artificial Sequence
  Description of Artificial Sequence: Synthetic oligonucleotide
gaaattaatacgactcactatagggatgaatagcacctgccagcctgccccagttttagagctatgctgttttg

SEQ ID NO: 722 - DNA, 74 bp, Artificial Sequence
  Description of Artificial Sequence: Synthetic oligonucleotide
gaaattaatacgactcactatagggatgaataacttcctgcatgtccaaaaagttttagagctatgctgttttg

SEQ ID NO: 723 - DNA, 74 bp, Artificial Sequence
  Description of Artificial Sequence: Synthetic oligonucleotide
gaaattaatacgactcactatagggatgaataggagtgtttgtgatgagtcagttttagagctatgctgttttg

SEQ ID NO: 724 - DNA, 74 bp, Artificial Sequence
  Description of Artificial Sequence: Synthetic oligonucleotide
gaaattaatacgactcactatagggatgaatacagtttgcttccaaatgtaagttttagagctatgctgttttg

SEQ ID NO: 725 - DNA, 74 bp, Artificial Sequence
  Description of Artificial Sequence: Synthetic oligonucleotide
gaaattaatacgactcactatagggatgaataagtcatgcaatgattacaaggttttagagctatgctgttttg

SEQ ID NO: 726 - DNA, 74 bp, Artificial Sequence
  Description of Artificial Sequence: Synthetic oligonucleotide
gaaattaatacgactcactatagggatgaataagacttcatcatatcaaggagttttagagctatgctgttttg

SEQ ID NO: 727 - DNA, 74 bp, Artificial Sequence
  Description of Artificial Sequence: Synthetic oligonucleotide
gaaattaatacgactcactatagggatgaataaaaagtctccatgcttgtgagttttagagctatgctgttttg

SEQ ID NO: 728 - DNA, 74 bp, Artificial Sequence
  Description of Artificial Sequence: Synthetic oligonucleotide
gaaattaatacgactcactatagggatgaatatcagacattgttgcctgcccgttttagagctatgctgttttg

SEQ ID NO: 729 - DNA, 74 bp, Artificial Sequence
  Description of Artificial Sequence: Synthetic oligonucleotide
gaaattaatacgactcactatagggatgaataaatggtagactgaatgggcagttttagagctatgctgttttg

SEQ ID NO: 730 - DNA, 74 bp, Artificial Sequence
  Description of Artificial Sequence: Synthetic oligonucleotide
gaaattaatacgactcactatagggatgaataatattctgatccccttcagggttttagagctatgctgttttg

SEQ ID NO: 731 - DNA, 74 bp, Artificial Sequence
  Description of Artificial Sequence: Synthetic oligonucleotide
gaaattaatacgactcactatagggatgaatacgggaggattgcctgagcccgttttagagctatgctgttttg

SEQ ID NO: 732 - DNA, 74 bp, Artificial Sequence
  Description of Artificial Sequence: Synthetic oligonucleotide
gaaattaatacgactcactatagggatgaataatatatccccattgttggaagttttagagctatgctgttttg

SEQ ID NO: 733 - DNA, 74 bp, Artificial Sequence
  Description of Artificial Sequence: Synthetic oligonucleotide
gaaattaatacgactcactatagggatgaatactaaacagatgttgtacagcgttttagagctatgctgttttg

SEQ ID NO: 734 - DNA, 74 bp, Artificial Sequence
  Description of Artificial Sequence: Synthetic oligonucleotide
gaaattaatacgactcactatagggatgaatatggcaggcccagagaactgcgttttagagctatgctgttttg

SEQ ID NO: 735 - DNA, 74 bp, Artificial Sequence
  Description of Artificial Sequence: Synthetic oligonucleotide
gaaattaatacgactcactatagggatgaataggaacttcatggccagaccggttttagagctatgctgttttg

SEQ ID NO: 736 - DNA, 74 bp, Artificial Sequence
  Description of Artificial Sequence: Synthetic oligonucleotide
gaaattaatacgactcactatagggatgaatattgccacatgactgtcatcagttttagagctatgctgttttg

SEQ ID NO: 737 - DNA, 74 bp, Artificial Sequence
  Description of Artificial Sequence: Synthetic oligonucleotide
gaaattaatacgactcactatagggatgaataagaaactgtcaccacagcaggttttagagctatgctgttttg

SEQ ID NO: 738 - DNA, 74 bp, Artificial Sequence
  Description of Artificial Sequence: Synthetic oligonucleotide
gaaattaatacgactcactatagggatgaataaagaggtccttggtacaaccgttttagagctatgctgttttg

SEQ ID NO: 739 - DNA, 74 bp, Artificial Sequence
  Description of Artificial Sequence: Synthetic oligonucleotide
gaaattaatacgactcactatagggatgaatagaggaagtttgtatgggagggttttagagctatgctgttttg

SEQ ID NO: 740 - DNA, 74 bp, Artificial Sequence
  Description of Artificial Sequence: Synthetic oligonucleotide
gaaattaatacgactcactatagggatgaataacacccatcaacatttaaaggttttagagctatgctgttttg

SEQ ID NO: 741 - DNA, 74 bp, Artificial Sequence
  Description of Artificial Sequence: Synthetic oligonucleotide
gaaattaatacgactcactatagggatgaataatactaaaatatacagataggttttagagctatgctgttttg

SEQ ID NO: 742 - DNA, 74 bp, Artificial Sequence
  Description of Artificial Sequence: Synthetic oligonucleotide
gaaattaatacgactcactatagggatgaataaatgatgtcatcaagaatccgttttagagctatgctgttttg

SEQ ID NO: 743 - DNA, 74 bp, Artificial Sequence
  Description of Artificial Sequence: Synthetic oligonucleotide
gaaattaatacgactcactatagggatgaatatcgaaatactcattataccagttttagagctatgctgttttg

SEQ ID NO: 744 - DNA, 74 bp, Artificial Sequence
  Description of Artificial Sequence: Synthetic oligonucleotide
gaaattaatacgactcactatagggatgaatagggaggggcaagttgcgggggttttagagctatgctgttttg

SEQ ID NO: 745 - DNA, 74 bp, Artificial Sequence
  Description of Artificial Sequence: Synthetic oligonucleotide
gaaattaatacgactcactatagggatgaatacagctataaggggattgcaagttttagagctatgctgttttg

SEQ ID NO: 746 - DNA, 74 bp, Artificial Sequence
  Description of Artificial Sequence: Synthetic oligonucleotide
gaaattaatacgactcactatagggatgaataagatgcagagggtcctgggggttttagagctatgctgttttg

SEQ ID NO: 747 - DNA, 74 bp, Artificial Sequence
  Description of Artificial Sequence: Synthetic oligonucleotide
gaaattaatacgactcactatagggatgaataaagcagaaggacaggaagaggttttagagctatgctgttttg

SEQ ID NO: 748 - DNA, 74 bp, Artificial Sequence
  Description of Artificial Sequence: Synthetic oligonucleotide
gaaattaatacgactcactatagggatgaatataggctgggaaggagtgcaggttttagagctatgctgttttg

SEQ ID NO: 749 - DNA, 74 bp, Artificial Sequence
  Description of Artificial Sequence: Synthetic oligonucleotide
gaaattaatacgactcactatagggatgaataacaaataaagcaggatatacgttttagagctatgctgttttg

SEQ ID NO: 750 - DNA, 74 bp, Artificial Sequence
  Description of Artificial Sequence: Synthetic oligonucleotide
gaaattaatacgactcactatagggatgaatattgttcagtttatattctaagttttagagctatgctgttttg

SEQ ID NO: 751 - DNA, 74 bp, Artificial Sequence
  Description of Artificial Sequence: Synthetic oligonucleotide
gaaattaatacgactcactatagggatgaatagaacttcttttgattgcaaagttttagagctatgctgttttg

SEQ ID NO: 752 - DNA, 74 bp, Artificial Sequence
  Description of Artificial Sequence: Synthetic oligonucleotide
gaaattaatacgactcactatagggatgaatatatcctggacaaagcacagggttttagagctatgctgttttg

SEQ ID NO: 753 - DNA, 74 bp, Artificial Sequence
  Description of Artificial Sequence: Synthetic oligonucleotide
gaaattaatacgactcactatagggatgaatatggcaaaaggccataggaaggttttagagctatgctgttttg

SEQ ID NO: 754 - DNA, 74 bp, Artificial Sequence
  Description of Artificial Sequence: Synthetic oligonucleotide
gaaattaatacgactcactatagggatgaatatctgcacagacaagtgaagagttttagagctatgctgttttg

SEQ ID NO: 755 - DNA, 74 bp, Artificial Sequence
  Description of Artificial Sequence: Synthetic oligonucleotide
gaaattaatacgactcactatagggatgaataacaaacaaaaaaacaaatgcgttttagagctatgctgttttg

SEQ ID NO: 756 - DNA, 74 bp, Artificial Sequence
  Description of Artificial Sequence: Synthetic oligonucleotide
gaaattaatacgactcactatagggatgaataatgggcagctaattccaaaggttttagagctatgctgttttg

SEQ ID NO: 757 - DNA, 74 bp, Artificial Sequence
  Description of Artificial Sequence: Synthetic oligonucleotide
gaaattaatacgactcactatagggatgaataaagtttgggagattagaacggttttagagctatgctgttttg

SEQ ID NO: 758 - DNA, 74 bp, Artificial Sequence
  Description of Artificial Sequence: Synthetic oligonucleotide
gaaattaatacgactcactatagggatgaatacctgcttttccaacttcaaggttttagagctatgctgttttg

SEQ ID NO: 759 - DNA, 74 bp, Artificial Sequence
  Description of Artificial Sequence: Synthetic oligonucleotide
gaaattaatacgactcactatagggatgaatataagtcttctttttaaaaacgttttagagctatgctgttttg

SEQ ID NO: 760 - DNA, 74 bp, Artificial Sequence
  Description of Artificial Sequence: Synthetic oligonucleotide
gaaattaatacgactcactatagggatgaataaatggcatgctgccgaacacgttttagagctatgctgttttg

SEQ ID NO: 761 - DNA, 74 bp, Artificial Sequence
  Description of Artificial Sequence: Synthetic oligonucleotide
gaaattaatacgactcactatagggatgaataaggacaggggcctggggtgggttttagagctatgctgttttg

SEQ ID NO: 762 - DNA, 74 bp, Artificial Sequence
  Description of Artificial Sequence: Synthetic oligonucleotide
gaaattaatacgactcactatagggatgaataactcccattactccagcaaagttttagagctatgctgttttg

SEQ ID NO: 763 - DNA, 74 bp, Artificial Sequence
  Description of Artificial Sequence: Synthetic oligonucleotide
gaaattaatacgactcactatagggatgaatatctcttcatgtgcagaggaggttttagagctatgctgttttg

SEQ ID NO: 764 - DNA, 74 bp, Artificial Sequence
  Description of Artificial Sequence: Synthetic oligonucleotide
gaaattaatacgactcactatagggatgaatattaagggaacatggcagagggttttagagctatgctgttttg

SEQ ID NO: 765 - DNA, 74 bp, Artificial Sequence
  Description of Artificial Sequence: Synthetic oligonucleotide
gaaattaatacgactcactatagggatgaataaaaaaagccatcatctatcagttttagagctatgctgttttg

SEQ ID NO: 766 - DNA, 74 bp, Artificial Sequence
  Description of Artificial Sequence: Synthetic oligonucleotide
gaaattaatacgactcactatagggatgaatagttgatgtggtaagggaccggttttagagctatgctgttttg

SEQ ID NO: 767 - DNA, 74 bp, Artificial Sequence
  Description of Artificial Sequence: Synthetic oligonucleotide
gaaattaatacgactcactatagggatgaataattctggtctgccacaaggggttttagagctatgctgttttg

SEQ ID NO: 768 - DNA, 74 bp, Artificial Sequence
  Description of Artificial Sequence: Synthetic oligonucleotide
gaaattaatacgactcactatagggatgaataattcagagaagtaaacatgcgttttagagctatgctgttttg

SEQ ID NO: 769 - DNA, 74 bp, Artificial Sequence
  Description of Artificial Sequence: Synthetic oligonucleotide
gaaattaatacgactcactatagggatgaatactgctcaactcatacgcaaagttttagagctatgctgttttg

SEQ ID NO: 770 - DNA, 74 bp, Artificial Sequence
  Description of Artificial Sequence: Synthetic oligonucleotide
gaaattaatacgactcactatagggatgaataagagagagagaagggacccagttttagagctatgctgttttg

SEQ ID NO: 771 - DNA, 74 bp, Artificial Sequence
  Description of Artificial Sequence: Synthetic oligonucleotide
gaaattaatacgactcactatagggatgaatattactacttatgtaccctgggttttagagctatgctgttttg

SEQ ID NO: 772 - DNA, 74 bp, Artificial Sequence
  Description of Artificial Sequence: Synthetic oligonucleotide
gaaattaatacgactcactatagggatgaatattgcaggtaacatttacagggttttagagctatgctgttttg

SEQ ID NO: 773 - DNA, 74 bp, Artificial Sequence
  Description of Artificial Sequence: Synthetic oligonucleotide
gaaattaatacgactcactatagggatgaatacatcccattccttcacacgagttttagagctatgctgttttg

SEQ ID NO: 774 - DNA, 74 bp, Artificial Sequence
  Description of Artificial Sequence: Synthetic oligonucleotide
gaaattaatacgactcactatagggatgaatatggctgctttcatgccaaaagttttagagctatgctgttttg

SEQ ID NO: 775 - DNA, 74 bp, Artificial Sequence
  Description of Artificial Sequence: Synthetic oligonucleotide
gaaattaatacgactcactatagggatgaatatgatgccctaaatctggggcgttttagagctatgctgttttg

SEQ ID NO: 776 - DNA, 74 bp, Artificial Sequence
  Description of Artificial Sequence: Synthetic oligonucleotide
gaaattaatacgactcactatagggatgaatagcatggatgggtccaagtccgttttagagctatgctgttttg

SEQ ID NO: 777 - DNA, 74 bp, Artificial Sequence
  Description of Artificial Sequence: Synthetic oligonucleotide
gaaattaatacgactcactatagggatgaatatgttgtcagtggtgacatcggttttagagctatgctgttttg

SEQ ID NO: 778 - DNA, 74 bp, Artificial Sequence
  Description of Artificial Sequence: Synthetic oligonucleotide
gaaattaatacgactcactatagggatgaatacgaacatgtgcagccaatgggttttagagctatgctgttttg

SEQ ID NO: 779 - DNA, 74 bp, Artificial Sequence
  Description of Artificial Sequence: Synthetic oligonucleotide
gaaattaatacgactcactatagggatgaataaatcacatttatgagaccaagttttagagctatgctgttttg

SEQ ID NO: 780 - DNA, 74 bp, Artificial Sequence
  Description of Artificial Sequence: Synthetic oligonucleotide
gaaattaatacgactcactatagggatgaatactacaaagccaagaaaagcagttttagagctatgctgttttg

SEQ ID NO: 781 - DNA, 74 bp, Artificial Sequence
  Description of Artificial Sequence: Synthetic oligonucleotide
gaaattaatacgactcactatagggatgaatagatatatgaagtattaggaagttttagagctatgctgttttg

SEQ ID NO: 782 - DNA, 74 bp, Artificial Sequence
  Description of Artificial Sequence: Synthetic oligonucleotide
gaaattaatacgactcactatagggatgaataaaaaactgcaggtcaaagaagttttagagctatgctgttttg

SEQ ID NO: 783 - DNA, 74 bp, Artificial Sequence
  Description of Artificial Sequence: Synthetic oligonucleotide
gaaattaatacgactcactatagggatgaatagtatgtgttaaggaaggtaagttttagagctatgctgttttg

SEQ ID NO: 784 - DNA, 74 bp, Artificial Sequence
  Description of Artificial Sequence: Synthetic oligonucleotide
gaaattaatacgactcactatagggatgaatatgattataaactataagtgagttttagagctatgctgttttg

SEQ ID NO: 785 - DNA, 74 bp, Artificial Sequence
  Description of Artificial Sequence: Synthetic oligonucleotide
gaaattaatacgactcactatagggatgaatatcactgagtattatcacacagttttagagctatgctgttttg

SEQ ID NO: 786 - DNA, 74 bp, Artificial Sequence
  Description of Artificial Sequence: Synthetic oligonucleotide
gaaattaatacgactcactatagggatgaatacaaactaaaaattaaagtgagttttagagctatgctgttttg

SEQ ID NO: 787 - DNA, 74 bp, Artificial Sequence
  Description of Artificial Sequence: Synthetic oligonucleotide
gaaattaatacgactcactatagggatgaatataagcatccaatggcaagaggttttagagctatgctgttttg

SEQ ID NO: 788 - DNA, 74 bp, Artificial Sequence
  Description of Artificial Sequence: Synthetic oligonucleotide
gaaattaatacgactcactatagggatgaataccaaacttctattgctatccgttttagagctatgctgttttg

SEQ ID NO: 789 - DNA, 74 bp, Artificial Sequence
  Description of Artificial Sequence: Synthetic oligonucleotide
gaaattaatacgactcactatagggatgaatataaaatcttccagaaaacaagttttagagctatgctgttttg

SEQ ID NO: 790 - DNA, 74 bp, Artificial Sequence
  Description of Artificial Sequence: Synthetic oligonucleotide
gaaattaatacgactcactatagggatgaatataaactgttttcctcagcaagttttagagctatgctgttttg

SEQ ID NO: 791 - DNA, 74 bp, Artificial Sequence
  Description of Artificial Sequence: Synthetic oligonucleotide
gaaattaatacgactcactatagggatgaatacttggagttagaactccagagttttagagctatgctgttttg

SEQ ID NO: 792 - DNA, 74 bp, Artificial Sequence
  Description of Artificial Sequence: Synthetic oligonucleotide
gaaattaatacgactcactatagggatgaatacagtaagaataaaaataaccgttttagagctatgctgttttg

SEQ ID NO: 793 - DNA, 74 bp, Artificial Sequence
  Description of Artificial Sequence: Synthetic oligonucleotide
gaaattaatacgactcactatagggatgaatatagtgagccatccaaagaacgttttagagctatgctgttttg

SEQ ID NO: 794 - DNA, 74 bp, Artificial Sequence
  Description of Artificial Sequence: Synthetic oligonucleotide
gaaattaatacgactcactatagggatgaatagctgcttgaaatggtccagcgttttagagctatgctgttttg

SEQ ID NO: 795 - DNA, 74 bp, Artificial Sequence
  Description of Artificial Sequence: Synthetic oligonucleotide
gaaattaatacgactcactatagggatgaataagttagaagcattctggtaggttttagagctatgctgttttg

SEQ ID NO: 796 - DNA, 74 bp, Artificial Sequence
  Description of Artificial Sequence: Synthetic oligonucleotide
gaaattaatacgactcactatagggatgaataccaagggtgtagacacaggggttttagagctatgctgttttg

SEQ ID NO: 797 - DNA, 74 bp, Artificial Sequence
  Description of Artificial Sequence: Synthetic oligonucleotide
gaaattaatacgactcactatagggatgaatatggtcttagtcacatagtaggttttagagctatgctgttttg

SEQ ID NO: 798 - DNA, 74 bp, Artificial Sequence
  Description of Artificial Sequence: Synthetic oligonucleotide
gaaattaatacgactcactatagggatgaatataagtaattgcagtgcaggagttttagagctatgctgttttg

SEQ ID NO: 799 - DNA, 74 bp, Artificial Sequence
  Description of Artificial Sequence: Synthetic oligonucleotide
gaaattaatacgactcactatagggatgaataagggcacagaactgaagagcgttttagagctatgctgttttg

SEQ ID NO: 800 - DNA, 74 bp, Artificial Sequence
  Description of Artificial Sequence: Synthetic oligonucleotide
gaaattaatacgactcactatagggatgaataagaatttagaaattttacaagttttagagctatgctgttttg

SEQ ID NO: 801 - DNA, 74 bp, Artificial Sequence
  Description of Artificial Sequence: Synthetic oligonucleotide
gaaattaatacgactcactatagggatgaatacagagccattaggcatatgggttttagagctatgctgttttg

SEQ ID NO: 802 - DNA, 74 bp, Artificial Sequence
  Description of Artificial Sequence: Synthetic oligonucleotide
gaaattaatacgactcactatagggatgaatagtgtcttgggctgcctgtaagttttagagctatgctgttttg

SEQ ID NO: 803 - DNA, 74 bp, Artificial Sequence
  Description of Artificial Sequence: Synthetic oligonucleotide
gaaattaatacgactcactatagggatgaatacttcttcacattgaagatgagttttagagctatgctgttttg

SEQ ID NO: 804 - DNA, 74 bp, Artificial Sequence
  Description of Artificial Sequence: Synthetic oligonucleotide
gaaattaatacgactcactatagggatgaatatatgctattaatatggatcagttttagagctatgctgttttg

SEQ ID NO: 805 - DNA, 74 bp, Artificial Sequence
  Description of Artificial Sequence: Synthetic oligonucleotide
gaaattaatacgactcactatagggatgaatatatgagctcagaggaaaggagttttagagctatgctgttttg

SEQ ID NO: 806 - DNA, 74 bp, Artificial Sequence
  Description of Artificial Sequence: Synthetic oligonucleotide
gaaattaatacgactcactatagggatgaatacctttaggttaattgcaaaggttttagagctatgctgttttg

SEQ ID NO: 807 - DNA, 74 bp, Artificial Sequence
  Description of Artificial Sequence: Synthetic oligonucleotide
gaaattaatacgactcactatagggatgaataagaataacagagatttaacagttttagagctatgctgttttg

SEQ ID NO: 808 - DNA, 74 bp, Artificial Sequence
  Description of Artificial Sequence: Synthetic oligonucleotide
gaaattaatacgactcactatagggatgaataaaatccaaaagtgcagctgcgttttagagctatgctgttttg

SEQ ID NO: 809 - DNA, 74 bp, Artificial Sequence
  Description of Artificial Sequence: Synthetic oligonucleotide
gaaattaatacgactcactatagggatgaatacatcatatttggggaaaaaagttttagagctatgctgttttg

SEQ ID NO: 810 - DNA, 74 bp, Artificial Sequence
  Description of Artificial Sequence: Synthetic oligonucleotide
gaaattaatacgactcactatagggatgaatagttctagagtgtaagtgaccgttttagagctatgctgttttg

SEQ ID NO: 811 - DNA, 74 bp, Artificial Sequence
  Description of Artificial Sequence: Synthetic oligonucleotide
gaaattaatacgactcactatagggatgaatatgagggaggatgaggacaaagttttagagctatgctgttttg

SEQ ID NO: 812 - DNA, 74 bp, Artificial Sequence
  Description of Artificial Sequence: Synthetic oligonucleotide
gaaattaatacgactcactatagggatgaataacagaggagcaaatcaaaccgttttagagctatgctgttttg

SEQ ID NO: 813 - DNA, 74 bp, Artificial Sequence
  Description of Artificial Sequence: Synthetic oligonucleotide
gaaattaatacgactcactatagggatgaatatagatttatttacactagaagttttagagctatgctgttttg

SEQ ID NO: 814 - DNA, 74 bp, Artificial Sequence
  Description of Artificial Sequence: Synthetic oligonucleotide
gaaattaatacgactcactatagggatgaataaagaatatatatatgacaaggttttagagctatgctgttttg

SEQ ID NO: 815 - DNA, 74 bp, Artificial Sequence
  Description of Artificial Sequence: Synthetic oligonucleotide
gaaattaatacgactcactatagggatgaatacagtattggaaagacaacaagttttagagctatgctgttttg

SEQ ID NO: 816 - DNA, 74 bp, Artificial Sequence
  Description of Artificial Sequence: Synthetic oligonucleotide
gaaattaatacgactcactatagggatgaatagggcaggaataagggggaaggttttagagctatgctgttttg

SEQ ID NO: 817 - DNA, 74 bp, Artificial Sequence
  Description of Artificial Sequence: Synthetic oligonucleotide
gaaattaatacgactcactatagggatgaataaaggaggggttagcatctgggttttagagctatgctgttttg

SEQ ID NO: 818 - DNA, 74 bp, Artificial Sequence
  Description of Artificial Sequence: Synthetic oligonucleotide
gaaattaatacgactcactatagggatgaatacatagggacactctgcagaagttttagagctatgctgttttg

SEQ ID NO: 819 - DNA, 74 bp, Artificial Sequence
  Description of Artificial Sequence: Synthetic oligonucleotide
gaaattaatacgactcactatagggatgaatatgtgagtttcatgagtggaggttttagagctatgctgttttg

SEQ ID NO: 820 - DNA, 74 bp, Artificial Sequence
  Description of Artificial Sequence: Synthetic oligonucleotide
gaaattaatacgactcactatagggatgaataactgagacttgacttaccaagttttagagctatgctgttttg

SEQ ID NO: 821 - DNA, 74 bp, Artificial Sequence
  Description of Artificial Sequence: Synthetic oligonucleotide
gaaattaatacgactcactatagggatgaatagaaaggagaaaagtcaataagttttagagctatgctgttttg

SEQ ID NO: 822 - DNA, 74 bp, Artificial Sequence
  Description of Artificial Sequence: Synthetic oligonucleotide
gaaattaatacgactcactatagggatgaatagatgagggattgcatgcaaggttttagagctatgctgttttg

SEQ ID NO: 823 - DNA, 74 bp, Artificial Sequence
  Description of Artificial Sequence: Synthetic oligonucleotide
gaaattaatacgactcactatagggatgaatatttttgctgtgaaatactgcgttttagagctatgctgttttg

SEQ ID NO: 824 - DNA, 74 bp, Artificial Sequence
  Description of Artificial Sequence: Synthetic oligonucleotide
gaaattaatacgactcactatagggatgaatagagaaggtttaagcctgagagttttagagctatgctgttttg

SEQ ID NO: 825 - DNA, 74 bp, Artificial Sequence
  Description of Artificial Sequence: Synthetic oligonucleotide
gaaattaatacgactcactatagggatgaatagggctggtcaaacaaaagcggttttagagctatgctgttttg

SEQ ID NO: 826 - DNA, 74 bp, Artificial Sequence
  Description of Artificial Sequence: Synthetic oligonucleotide
gaaattaatacgactcactatagggatgaatagaaagcttctctctgtacccgttttagagctatgctgttttg

SEQ ID NO: 827 - DNA, 74 bp, Artificial Sequence
  Description of Artificial Sequence: Synthetic oligonucleotide
gaaattaatacgactcactatagggatgaataaggataaaagaagagtgaaagttttagagctatgctgttttg

SEQ ID NO: 828 - DNA, 74 bp, Artificial Sequence
  Description of Artificial Sequence: Synthetic oligonucleotide
gaaattaatacgactcactatagggatgaatacaatcaacaggtcttagagagttttagagctatgctgttttg

SEQ ID NO: 829 - DNA, 74 bp, Artificial Sequence
  Description of Artificial Sequence: Synthetic oligonucleotide
gaaattaatacgactcactatagggatgaataaagttacaaagctacagcaagttttagagctatgctgttttg

SEQ ID NO: 830 - DNA, 74 bp, Artificial Sequence
  Description of Artificial Sequence: Synthetic oligonucleotide
gaaattaatacgactcactatagggatgaataactgaggcctggaatacagggttttagagctatgctgttttg

SEQ ID NO: 831 - DNA, 74 bp, Artificial Sequence
  Description of Artificial Sequence: Synthetic oligonucleotide
gaaattaatacgactcactatagggatgaataagtttgcaaccttgagatgagttttagagctatgctgttttg

SEQ ID NO: 832 - DNA, 74 bp, Artificial Sequence
  Description of Artificial Sequence: Synthetic oligonucleotide
gaaattaatacgactcactatagggatgaatattagattgagtggttggaaagttttagagctatgctgttttg

SEQ ID NO: 833 - DNA, 74 bp, Artificial Sequence
  Description of Artificial Sequence: Synthetic oligonucleotide
gaaattaatacgactcactatagggatgaataaatttctcagttggaactgagttttagagctatgctgttttg

SEQ ID NO: 834 - DNA, 74 bp, Artificial Sequence
  Description of Artificial Sequence: Synthetic oligonucleotide
gaaattaatacgactcactatagggatgaataacacttgatcatgtgcaaaagttttagagctatgctgttttg

SEQ ID NO: 835 - DNA, 74 bp, Artificial Sequence
  Description of Artificial Sequence: Synthetic oligonucleotide
gaaattaatacgactcactatagggatgaataaaaactcaaatggtacaacagttttagagctatgctgttttg

SEQ ID NO: 836 - DNA, 74 bp, Artificial Sequence
  Description of Artificial Sequence: Synthetic oligonucleotide
gaaattaatacgactcactatagggatgaataccactatgcttggagggagagttttagagctatgctgttttg

SEQ ID NO: 837 - DNA, 74 bp, Artificial Sequence
  Description of Artificial Sequence: Synthetic oligonucleotide
gaaattaatacgactcactatagggatgaatacctcctagtattggaaaagagttttagagctatgctgttttg

SEQ ID NO: 838 - DNA, 74 bp, Artificial Sequence
  Description of Artificial Sequence: Synthetic oligonucleotide
gaaattaatacgactcactatagggatgaatatgaaaaatataaggtagaaagttttagagctatgctgttttg

SEQ ID NO: 839 - DNA, 74 bp, Artificial Sequence
  Description of Artificial Sequence: Synthetic oligonucleotide
gaaattaatacgactcactatagggatgaatatgagaatacaataatgaaccgttttagagctatgctgttttg

SEQ ID NO: 840 - DNA, 74 bp, Artificial Sequence
  Description of Artificial Sequence: Synthetic oligonucleotide
gaaattaatacgactcactatagggatgaataagggcccacttctgtgacaggttttagagctatgctgttttg

SEQ ID NO: 841 - DNA, 74 bp, Artificial Sequence
  Description of Artificial Sequence: Synthetic oligonucleotide
gaaattaatacgactcactatagggatgaataatggttgaaaggtggggagggttttagagctatgctgttttg

SEQ ID NO: 842 - DNA, 74 bp, Artificial Sequence
  Description of Artificial Sequence: Synthetic oligonucleotide
gaaattaatacgactcactatagggatgaatatgtattttacactagggccagttttagagctatgctgttttg

SEQ ID NO: 843 - DNA, 74 bp, Artificial Sequence
  Description of Artificial Sequence: Synthetic oligonucleotide
gaaattaatacgactcactatagggatgaatagaaagaatgtttttttcccagttttagagctatgctgttttg

SEQ ID NO: 844 - DNA, 74 bp, Artificial Sequence
  Description of Artificial Sequence: Synthetic oligonucleotide
gaaattaatacgactcactatagggatgaatattaccttaactaatacaccagttttagagctatgctgttttg

SEQ ID NO: 845 - DNA, 74 bp, Artificial Sequence
  Description of Artificial Sequence: Synthetic oligonucleotide
gaaattaatacgactcactatagggatgaataactttgagccatggtgatgggttttagagctatgctgttttg

SEQ ID NO: 846 - DNA, 74 bp, Artificial Sequence
  Description of Artificial Sequence: Synthetic oligonucleotide
gaaattaatacgactcactatagggatgaataagaagcatctagctgaaccagttttagagctatgctgttttg

SEQ ID NO: 847 - DNA, 74 bp, Artificial Sequence
  Description of Artificial Sequence: Synthetic oligonucleotide
gaaattaatacgactcactatagggatgaatattaggctgctgagagacacagttttagagctatgctgttttg

SEQ ID NO: 848 - DNA, 74 bp, Artificial Sequence
  Description of Artificial Sequence: Synthetic oligonucleotide
gaaattaatacgactcactatagggatgaatagagaagcacgagggccacaggttttagagctatgctgttttg

SEQ ID NO: 849 - DNA, 74 bp, Artificial Sequence
  Description of Artificial Sequence: Synthetic oligonucleotide
gaaattaatacgactcactatagggatgaatatcactttcttattgcagacagttttagagctatgctgttttg

SEQ ID NO: 850 - DNA, 74 bp, Artificial Sequence
  Description of Artificial Sequence: Synthetic oligonucleotide
gaaattaatacgactcactatagggatgaatacagagataccatgaccaggcgttttagagctatgctgttttg

SEQ ID NO: 851 - DNA, 74 bp, Artificial Sequence
  Description of Artificial Sequence: Synthetic oligonucleotide
gaaattaatacgactcactatagggatgaataagtcggtatcaggacagcaagttttagagctatgctgttttg

SEQ ID NO: 852 - DNA, 74 bp, Artificial Sequence
  Description of Artificial Sequence: Synthetic oligonucleotide
gaaattaatacgactcactatagggatgaatagtgctttatcatgctgaggcgttttagagctatgctgttttg

SEQ ID NO: 853 - DNA, 74 bp, Artificial Sequence
  Description of Artificial Sequence: Synthetic oligonucleotide
gaaattaatacgactcactatagggatgaatatcagcaaaggcctagggagcgttttagagctatgctgttttg

SEQ ID NO: 854 - DNA, 74 bp, Artificial Sequence
  Description of Artificial Sequence: Synthetic oligonucleotide
gaaattaatacgactcactatagggatgaatatgtctaatcccccgccaggcgttttagagctatgctgttttg

SEQ ID NO: 855 - DNA, 74 bp, Artificial Sequence
  Description of Artificial Sequence: Synthetic oligonucleotide
gaaattaatacgactcactatagggatgaatatcttctccagctaaaggaccgttttagagctatgctgttttg

SEQ ID NO: 856 - DNA, 74 bp, Artificial Sequence
  Description of Artificial Sequence: Synthetic oligonucleotide
gaaattaatacgactcactatagggatgaatacattaacactgagatgaagcgttttagagctatgctgttttg

SEQ ID NO: 857 - DNA, 74 bp, Artificial Sequence
  Description of Artificial Sequence: Synthetic oligonucleotide
gaaattaatacgactcactatagggatgaatagagatccgatttcactgggggttttagagctatgctgttttg

SEQ ID NO: 858 - DNA, 74 bp, Artificial Sequence
  Description of Artificial Sequence: Synthetic oligonucleotide
gaaattaatacgactcactatagggatgaatagagatcagtgaggctgaccagttttagagctatgctgttttg

SEQ ID NO: 859 - DNA, 74 bp, Artificial Sequence
  Description of Artificial Sequence: Synthetic oligonucleotide
gaaattaatacgactcactatagggatgaatacaaattaaaattgattccacgttttagagctatgctgttttg

SEQ ID NO: 860 - DNA, 74 bp, Artificial Sequence
  Description of Artificial Sequence: Synthetic oligonucleotide
gaaattaatacgactcactatagggatgaatacttatctcaaccaatgagaggttttagagctatgctgttttg

SEQ ID NO: 861 - DNA, 74 bp, Artificial Sequence
  Description of Artificial Sequence: Synthetic oligonucleotide
gaaattaatacgactcactatagggatgaatattgtaaccagagtaacaacagttttagagctatgctgttttg

SEQ ID NO: 862 - DNA, 74 bp, Artificial Sequence
  Description of Artificial Sequence: Synthetic oligonucleotide
gaaattaatacgactcactatagggatgaatagattactaagcaccatagccgttttagagctatgctgttttg

SEQ ID NO: 863 - DNA, 74 bp, Artificial Sequence
  Description of Artificial Sequence: Synthetic oligonucleotide
gaaattaatacgactcactatagggatgaatatataaagcccagactcacaagttttagagctatgctgttttg

SEQ ID NO: 864 - DNA, 74 bp, Artificial Sequence
  Description of Artificial Sequence: Synthetic oligonucleotide
gaaattaatacgactcactatagggatgaataccaaaggaactcagagatcagttttagagctatgctgttttg

SEQ ID NO: 865 - DNA, 74 bp, Artificial Sequence
  Description of Artificial Sequence: Synthetic oligonucleotide
gaaattaatacgactcactatagggatgaatactttaccccaaacaaccaacgttttagagctatgctgttttg

SEQ ID NO: 866 - DNA, 74 bp, Artificial Sequence
  Description of Artificial Sequence: Synthetic oligonucleotide
gaaattaatacgactcactatagggatgaatatgacagccatgaatacctccgttttagagctatgctgttttg

SEQ ID NO: 867 - DNA, 74 bp, Artificial Sequence
  Description of Artificial Sequence: Synthetic oligonucleotide
gaaattaatacgactcactatagggatgaataagaagccactcaccagctaagttttagagctatgctgttttg

SEQ ID NO: 868 - DNA, 74 bp, Artificial Sequence
  Description of Artificial Sequence: Synthetic oligonucleotide
gaaattaatacgactcactatagggatgaatacgtggctgtcagctacagcggttttagagctatgctgttttg

SEQ ID NO: 869 - DNA, 74 bp, Artificial Sequence
  Description of Artificial Sequence: Synthetic oligonucleotide
gaaattaatacgactcactatagggatgaatagctctcttggcccagagcccgttttagagctatgctgttttg

SEQ ID NO: 870 - DNA, 74 bp, Artificial Sequence
  Description of Artificial Sequence: Synthetic oligonucleotide
gaaattaatacgactcactatagggatgaatatctccctgcttctaccaagagttttagagctatgctgttttg

SEQ ID NO: 871 - DNA, 74 bp, Artificial Sequence
  Description of Artificial Sequence: Synthetic oligonucleotide
gaaattaatacgactcactatagggatgaatacggggcctgtcatgggatgggttttagagctatgctgttttg

SEQ ID NO: 872 - DNA, 74 bp, Artificial Sequence
  Description of Artificial Sequence: Synthetic oligonucleotide
gaaattaatacgactcactatagggatgaatagagactaaactgcctgggcagttttagagctatgctgttttg

SEQ ID NO: 873 - DNA, 74 bp, Artificial Sequence
  Description of Artificial Sequence: Synthetic oligonucleotide
gaaattaatacgactcactatagggatgaataggaaagagatccaccaggacgttttagagctatgctgttttg

SEQ ID NO: 874 - DNA, 74 bp, Artificial Sequence
  Description of Artificial Sequence: Synthetic oligonucleotide
gaaattaatacgactcactatagggatgaataggtatcacagtgggatagccgttttagagctatgctgttttg

SEQ ID NO: 875 - DNA, 74 bp, Artificial Sequence
  Description of Artificial Sequence: Synthetic oligonucleotide
gaaattaatacgactcactatagggatgaataaagcctttacatgcatgcgagttttagagctatgctgttttg

SEQ ID NO: 876 - DNA, 74 bp, Artificial Sequence
  Description of Artificial Sequence: Synthetic oligonucleotide
gaaattaatacgactcactatagggatgaatacctgtctcataaacaaaaaagttttagagctatgctgttttg

SEQ ID NO: 877 - DNA, 74 bp, Artificial Sequence
  Description of Artificial Sequence: Synthetic oligonucleotide
gaaattaatacgactcactatagggatgaataataaggctgcatgcctctgagttttagagctatgctgttttg

SEQ ID NO: 878 - DNA, 74 bp, Artificial Sequence
  Description of Artificial Sequence: Synthetic oligonucleotide
gaaattaatacgactcactatagggatgaataagtaggtaagtgggccagacgttttagagctatgctgttttg

SEQ ID NO: 879 - DNA, 74 bp, Artificial Sequence
  Description of Artificial Sequence: Synthetic oligonucleotide
gaaattaatacgactcactatagggatgaatatcaaattatttgtttaatcagttttagagctatgctgttttg

SEQ ID NO: 880 - DNA, 74 bp, Artificial Sequence
  Description of Artificial Sequence: Synthetic oligonucleotide
gaaattaatacgactcactatagggatgaatagaatccctgaagtctgaagggttttagagctatgctgttttg

SEQ ID NO: 881 - DNA, 74 bp, Artificial Sequence
  Description of Artificial Sequence: Synthetic oligonucleotide
gaaattaatacgactcactatagggatgaatagaaaaactcaacaaagatccgttttagagctatgctgttttg

SEQ ID NO: 882 - DNA, 74 bp, Artificial Sequence
  Description of Artificial Sequence: Synthetic oligonucleotide
gaaattaatacgactcactatagggatgaatagaaagtgagtcacagtacccgttttagagctatgctgttttg

SEQ ID NO: 883 - DNA, 74 bp, Artificial Sequence
  Description of Artificial Sequence: Synthetic oligonucleotide
gaaattaatacgactcactatagggatgaatatagaaaggataactttctcagttttagagctatgctgttttg

SEQ ID NO: 884 - DNA, 74 bp, Artificial Sequence
  Description of Artificial Sequence: Synthetic oligonucleotide
gaaattaatacgactcactatagggatgaatatctagttgaaataatccccggttttagagctatgctgttttg

SEQ ID NO: 885 - DNA, 74 bp, Artificial Sequence
  Description of Artificial Sequence: Synthetic oligonucleotide
gaaattaatacgactcactatagggatgaataaaggcacattccaattacacgttttagagctatgctgttttg

SEQ ID NO: 886 - DNA, 74 bp, Artificial Sequence
  Description of Artificial Sequence: Synthetic oligonucleotide
gaaattaatacgactcactatagggatgaatatatcccctctgagttactcagttttagagctatgctgttttg

SEQ ID NO: 887 - DNA, 74 bp, Artificial Sequence
  Description of Artificial Sequence: Synthetic oligonucleotide
gaaattaatacgactcactatagggatgaatattgggggtgagccagaacaggttttagagctatgctgttttg

SEQ ID NO: 888 - DNA, 74 bp, Artificial Sequence
  Description of Artificial Sequence: Synthetic oligonucleotide
gaaattaatacgactcactatagggatgaatagaatgtctgagatgcaatcggttttagagctatgctgttttg

SEQ ID NO: 889 - DNA, 74 bp, Artificial Sequence
  Description of Artificial Sequence: Synthetic oligonucleotide
gaaattaatacgactcactatagggatgaataaagattctaaatgcagacccgttttagagctatgctgttttg

SEQ ID NO: 890 - DNA, 74 bp, Artificial Sequence
  Description of Artificial Sequence: Synthetic oligonucleotide
gaaattaatacgactcactatagggatgaatatgatatgccctctagaagaagttttagagctatgctgttttg

SEQ ID NO: 891 - DNA, 74 bp, Artificial Sequence
  Description of Artificial Sequence: Synthetic oligonucleotide
gaaattaatacgactcactatagggatgaatacagctcagccatttaccagcgttttagagctatgctgttttg

SEQ ID NO: 892 - DNA, 74 bp, Artificial Sequence
  Description of Artificial Sequence: Synthetic oligonucleotide
gaaattaatacgactcactatagggatgaataacattctacctaagaaccacgttttagagctatgctgttttg

SEQ ID NO: 893 - DNA, 74 bp, Artificial Sequence
  Description of Artificial Sequence: Synthetic oligonucleotide
gaaattaatacgactcactatagggatgaataattttaagcctctgcaatccgttttagagctatgctgttttg

SEQ ID NO: 894 - DNA, 74 bp, Artificial Sequence
  Description of Artificial Sequence: Synthetic oligonucleotide
gaaattaatacgactcactatagggatgaataactgtaaagtacaaggcccggttttagagctatgctgttttg

SEQ ID NO: 895 - DNA, 74 bp, Artificial Sequence
  Description of Artificial Sequence: Synthetic oligonucleotide
gaaattaatacgactcactatagggatgaatatttagtacaaaaattcaaacgttttagagctatgctgttttg

SEQ ID NO: 896 - DNA, 74 bp, Artificial Sequence
  Description of Artificial Sequence: Synthetic oligonucleotide
gaaattaatacgactcactatagggatgaataaatgagaagggaccacacgagttttagagctatgctgttttg

SEQ ID NO: 897 - DNA, 74 bp, Artificial Sequence
  Description of Artificial Sequence: Synthetic oligonucleotide
gaaattaatacgactcactatagggatgaatagaagctggagaactaagaaggttttagagctatgctgttttg

SEQ ID NO: 898 - DNA, 74 bp, Artificial Sequence
  Description of Artificial Sequence: Synthetic oligonucleotide
gaaattaatacgactcactatagggatgaataaaagcaatatgtcaaggaaagttttagagctatgctgttttg

SEQ ID NO: 899 - DNA, 74 bp, Artificial Sequence
  Description of Artificial Sequence: Synthetic oligonucleotide
gaaattaatacgactcactatagggatgaatagtgtgtgtttttcaggaaacgttttagagctatgctgttttg

SEQ ID NO: 900 - DNA, 74 bp, Artificial Sequence
  Description of Artificial Sequence: Synthetic oligonucleotide
gaaattaatacgactcactatagggatgaatattgggagatgaaggaaaacagttttagagctatgctgttttg

SEQ ID NO: 901 - DNA, 74 bp, Artificial Sequence
  Description of Artificial Sequence: Synthetic oligonucleotide
gaaattaatacgactcactatagggatgaatacagcctaggcgacagagcaagttttagagctatgctgttttg

SEQ ID NO: 902 - DNA, 74 bp, Artificial Sequence
  Description of Artificial Sequence: Synthetic oligonucleotide
gaaattaatacgactcactatagggatgaatagaacaaatactcaaaacaccgttttagagctatgctgttttg

SEQ ID NO: 903 - DNA, 74 bp, Artificial Sequence
  Description of Artificial Sequence: Synthetic oligonucleotide
gaaattaatacgactcactatagggatgaatagggagaccttcgtcagcccggttttagagctatgctgttttg

SEQ ID NO: 904 - DNA, 74 bp, Artificial Sequence
  Description of Artificial Sequence: Synthetic oligonucleotide
gaaattaatacgactcactatagggatgaatactttgctggtagacccaggcgttttagagctatgctgttttg

SEQ ID NO: 905 - DNA, 74 bp, Artificial Sequence
  Description of Artificial Sequence: Synthetic oligonucleotide
gaaattaatacgactcactatagggatgaatagggaacacccagcatagaaagttttagagctatgctgttttg

SEQ ID NO: 906 - DNA, 74 bp, Artificial Sequence
  Description of Artificial Sequence: Synthetic oligonucleotide
gaaattaatacgactcactatagggatgaatacttgccacagtcatctctgggttttagagctatgctgttttg

SEQ ID NO: 907 - DNA, 74 bp, Artificial Sequence
  Description of Artificial Sequence: Synthetic oligonucleotide
gaaattaatacgactcactatagggatgaatatcaacttatttgtgggagacgttttagagctatgctgttttg

SEQ ID NO: 908 - DNA, 74 bp, Artificial Sequence
  Description of Artificial Sequence: Synthetic oligonucleotide
gaaattaatacgactcactatagggatgaatatgtgcacataaagtgagagagttttagagctatgctgttttg

SEQ ID NO: 909 - DNA, 74 bp, Artificial Sequence
  Description of Artificial Sequence: Synthetic oligonucleotide
gaaattaatacgactcactatagggatgaatagcagaggcagggagaaccgcgttttagagctatgctgttttg

SEQ ID NO: 910 - DNA, 74 bp, Artificial Sequence
  Description of Artificial Sequence: Synthetic oligonucleotide
gaaattaatacgactcactatagggatgaatacgaggaagtgagttccgtgagttttagagctatgctgttttg

SEQ ID NO: 911 - DNA, 74 bp, Artificial Sequence
  Description of Artificial Sequence: Synthetic oligonucleotide
gaaattaatacgactcactatagggatgaatattactgcatagttactaaaagttttagagctatgctgttttg

SEQ ID NO: 912 - DNA, 74 bp, Artificial Sequence
  Description of Artificial Sequence: Synthetic oligonucleotide
gaaattaatacgactcactatagggatgaatacctggctcaatgtcaacaaagttttagagctatgctgttttg

SEQ ID NO: 913 - DNA, 74 bp, Artificial Sequence
  Description of Artificial Sequence: Synthetic oligonucleotide
gaaattaatacgactcactatagggatgaataatgacagacaggtagcacaggttttagagctatgctgttttg

SEQ ID NO: 914 - DNA, 74 bp, Artificial Sequence
  Description of Artificial Sequence: Synthetic oligonucleotide
gaaattaatacgactcactatagggatgaatagcaattcttcatttaactaggttttagagctatgctgttttg

SEQ ID NO: 915 - DNA, 74 bp, Artificial Sequence
  Description of Artificial Sequence: Synthetic oligonucleotide
gaaattaatacgactcactatagggatgaatagttatgatgacaagcactaagttttagagctatgctgttttg

SEQ ID NO: 916 - DNA, 74 bp, Artificial Sequence
  Description of Artificial Sequence: Synthetic oligonucleotide
gaaattaatacgactcactatagggatgaatacagaaagaaggatgtcagaggttttagagctatgctgttttg

SEQ ID NO: 917 - DNA, 74 bp, Artificial Sequence
  Description of Artificial Sequence: Synthetic oligonucleotide
gaaattaatacgactcactatagggatgaataaggggcttttcaagaggcacgttttagagctatgctgttttg

SEQ ID NO: 918 - DNA, 74 bp, Artificial Sequence
  Description of Artificial Sequence: Synthetic oligonucleotide
gaaattaatacgactcactatagggatgaataagatgaaagtgagaaggggagttttagagctatgctgttttg

SEQ ID NO: 919 - DNA, 74 bp, Artificial Sequence
  Description of Artificial Sequence: Synthetic oligonucleotide
gaaattaatacgactcactatagggatgaataaaagtctcacaaaataccacgttttagagctatgctgttttg

SEQ ID NO: 920 - DNA, 74 bp, Artificial Sequence
  Description of Artificial Sequence: Synthetic oligonucleotide
gaaattaatacgactcactatagggatgaataaaacttcagacatgatgaaagttttagagctatgctgttttg

SEQ ID NO: 921 - DNA, 74 bp, Artificial Sequence
  Description of Artificial Sequence: Synthetic oligonucleotide
gaaattaatacgactcactatagggatgaataaaaagctttcacggggcggggttttagagctatgctgttttg

SEQ ID NO: 922 - DNA, 74 bp, Artificial Sequence
  Description of Artificial Sequence: Synthetic oligonucleotide
gaaattaatacgactcactatagggatgaatacaggagagaataaggaatgagttttagagctatgctgttttg

SEQ ID NO: 923 - DNA, 74 bp, Artificial Sequence
  Description of Artificial Sequence: Synthetic oligonucleotide
gaaattaatacgactcactatagggatgaatacaacccacagcgcgatcaaagttttagagctatgctgttttg

SEQ ID NO: 924 - DNA, 74 bp, Artificial Sequence
  Description of Artificial Sequence: Synthetic oligonucleotide
gaaattaatacgactcactatagggatgaatatctcatgtcactaaaccagcgttttagagctatgctgttttg

SEQ ID NO: 925 - DNA, 74 bp, Artificial Sequence
  Description of Artificial Sequence: Synthetic oligonucleotide
gaaattaatacgactcactatagggatgaataatacataaaaacgggtaccagttttagagctatgctgttttg

SEQ ID NO: 926 - DNA, 74 bp, Artificial Sequence
  Description of Artificial Sequence: Synthetic oligonucleotide
gaaattaatacgactcactatagggatgaatatcttaactgattcagaagaagttttagagctatgctgttttg

SEQ ID NO: 927 - DNA, 74 bp, Artificial Sequence
  Description of Artificial Sequence: Synthetic oligonucleotide
gaaattaatacgactcactatagggatgaatactgtaaatgtcatggtataagttttagagctatgctgttttg

SEQ ID NO: 928 - DNA, 74 bp, Artificial Sequence
  Description of Artificial Sequence: Synthetic oligonucleotide
gaaattaatacgactcactatagggatgaatatcacagccaatcatgactgcgttttagagctatgctgttttg

SEQ ID NO: 929 - DNA, 74 bp, Artificial Sequence
  Description of Artificial Sequence: Synthetic oligonucleotide
gaaattaatacgactcactatagggatgaatattgcatcctatctctaatcagttttagagctatgctgttttg

SEQ ID NO: 930 - DNA, 74 bp, Artificial Sequence
  Description of Artificial Sequence: Synthetic oligonucleotide
gaaattaatacgactcactatagggatgaataaagcatgtgcaaggaggagcgttttagagctatgctgttttg

SEQ ID NO: 931 - DNA, 74 bp, Artificial Sequence
  Description of Artificial Sequence: Synthetic oligonucleotide
gaaattaatacgactcactatagggatgaataagttagagcgaccataaggcgttttagagctatgctgttttg

SEQ ID NO: 932 - DNA, 74 bp, Artificial Sequence
  Description of Artificial Sequence: Synthetic oligonucleotide
gaaattaatacgactcactatagggatgaataaagcggggatctgaggaagcgttttagagctatgctgttttg

SEQ ID NO: 933 - DNA, 74 bp, Artificial Sequence
  Description of Artificial Sequence: Synthetic oligonucleotide
gaaattaatacgactcactatagggatgaataacagaggacacatgccaaccgttttagagctatgctgttttg

SEQ ID NO: 934 - DNA, 74 bp, Artificial Sequence
  Description of Artificial Sequence: Synthetic oligonucleotide
gaaattaatacgactcactatagggatgaatagcgtgtatgcagatagatgagttttagagctatgctgttttg

SEQ ID NO: 935 - DNA, 74 bp, Artificial Sequence
  Description of Artificial Sequence: Synthetic oligonucleotide
gaaattaatacgactcactatagggatgaatagtagtaactggctcacatgagttttagagctatgctgttttg

SEQ ID NO: 936 - DNA, 74 bp, Artificial Sequence
  Description of Artificial Sequence: Synthetic oligonucleotide
gaaattaatacgactcactatagggatgaatagagaggagaaaggtggagccgttttagagctatgctgttttg

SEQ ID NO: 937 - DNA, 74 bp, Artificial Sequence
  Description of Artificial Sequence: Synthetic oligonucleotide
gaaattaatacgactcactatagggatgaatagatgaatgaaaatgcaaggcgttttagagctatgctgttttg

SEQ ID NO: 938 - DNA, 74 bp, Artificial Sequence
  Description of Artificial Sequence: Synthetic oligonucleotide
gaaattaatacgactcactatagggatgaatacttaaccttgtgggaaatgagttttagagctatgctgttttg

SEQ ID NO: 939 - DNA, 74 bp, Artificial Sequence
  Description of Artificial Sequence: Synthetic oligonucleotide
gaaattaatacgactcactatagggatgaatactgttctggccccagacacagttttagagctatgctgttttg

SEQ ID NO: 940 - DNA, 74 bp, Artificial Sequence
  Description of Artificial Sequence: Synthetic oligonucleotide
gaaattaatacgactcactatagggatgaatatgttaacacgggggaggggcgttttagagctatgctgttttg

SEQ ID NO: 941 - DNA, 74 bp, Artificial Sequence
  Description of Artificial Sequence: Synthetic oligonucleotide
gaaattaatacgactcactatagggatgaatatggctttccgttcctggagggttttagagctatgctgttttg

SEQ ID NO: 942 - DNA, 74 bp, Artificial Sequence
  Description of Artificial Sequence: Synthetic oligonucleotide
gaaattaatacgactcactatagggatgaataagttcgagaacagctggcccgttttagagctatgctgttttg

SEQ ID NO: 943 - DNA, 74 bp, Artificial Sequence
  Description of Artificial Sequence: Synthetic oligonucleotide
gaaattaatacgactcactatagggatgaatatttaggtgatcatacaggacgttttagagctatgctgttttg

SEQ ID NO: 944 - DNA, 74 bp, Artificial Sequence
  Description of Artificial Sequence: Synthetic oligonucleotide
gaaattaatacgactcactatagggatgaataatgaacacagggattggggagttttagagctatgctgttttg

SEQ ID NO: 945 - DNA, 74 bp, Artificial Sequence
  Description of Artificial Sequence: Synthetic oligonucleotide
gaaattaatacgactcactatagggatgaatatgtcttacagtgagacccacgttttagagctatgctgttttg

SEQ ID NO: 946 - DNA, 74 bp, Artificial Sequence
  Description of Artificial Sequence: Synthetic oligonucleotide
gaaattaatacgactcactatagggatgaatacaatgacatgtaagtgaaaggttttagagctatgctgttttg

SEQ ID NO: 947 - DNA, 74 bp, Artificial Sequence
  Description of Artificial Sequence: Synthetic oligonucleotide
gaaattaatacgactcactatagggatgaatagtaccatattttgtttctgagttttagagctatgctgttttg

SEQ ID NO: 948 - DNA, 74 bp, Artificial Sequence
  Description of Artificial Sequence: Synthetic oligonucleotide
gaaattaatacgactcactatagggatgaatagggaggatttattctgaagagttttagagctatgctgttttg

SEQ ID NO: 949 - DNA, 74 bp, Artificial Sequence
  Description of Artificial Sequence: Synthetic oligonucleotide
gaaattaatacgactcactatagggatgaatacagttgacagaaaattgtccgttttagagctatgctgttttg

SEQ ID NO: 950 - DNA, 74 bp, Artificial Sequence
  Description of Artificial Sequence: Synthetic oligonucleotide
gaaattaatacgactcactatagggatgaatatcacacagagaagaaacagagttttagagctatgctgttttg

SEQ ID NO: 951 - DNA, 74 bp, Artificial Sequence
  Description of Artificial Sequence: Synthetic oligonucleotide
gaaattaatacgactcactatagggatgaatagtgatcactgaagggacagagttttagagctatgctgttttg

SEQ ID NO: 952 - DNA, 74 bp, Artificial Sequence
  Description of Artificial Sequence: Synthetic oligonucleotide
gaaattaatacgactcactatagggatgaatataaagccatgactaggaaaagttttagagctatgctgttttg

SEQ ID NO: 953 - DNA, 74 bp, Artificial Sequence
  Description of Artificial Sequence: Synthetic oligonucleotide
gaaattaatacgactcactatagggatgaataaatggagcaggaagaggagagttttagagctatgctgttttg

SEQ ID NO: 954 - DNA, 74 bp, Artificial Sequence
  Description of Artificial Sequence: Synthetic oligonucleotide
gaaattaatacgactcactatagggatgaataccaggaaagcaaactcgaaagttttagagctatgctgttttg

SEQ ID NO: 955 - DNA, 74 bp, Artificial Sequence
  Description of Artificial Sequence: Synthetic oligonucleotide
gaaattaatacgactcactatagggatgaataagaacacaatgatgagctaggttttagagctatgctgttttg

SEQ ID NO: 956 - DNA, 74 bp, Artificial Sequence
  Description of Artificial Sequence: Synthetic oligonucleotide
gaaattaatacgactcactatagggatgaatattgcactaggagatctgtcagttttagagctatgctgttttg

SEQ ID NO: 957 - DNA, 74 bp, Artificial Sequence
  Description of Artificial Sequence: Synthetic oligonucleotide
gaaattaatacgactcactatagggatgaatagcaggcaaggtaagcactgagttttagagctatgctgttttg

SEQ ID NO: 958 - DNA, 74 bp, Artificial Sequence
  Description of Artificial Sequence: Synthetic oligonucleotide
gaaattaatacgactcactatagggatgaatatattgaagggtcaagggagagttttagagctatgctgttttg

SEQ ID NO: 959 - DNA, 74 bp, Artificial Sequence
  Description of Artificial Sequence: Synthetic oligonucleotide
gaaattaatacgactcactatagggatgaatataggcacgtggtacaggaaagttttagagctatgctgttttg

SEQ ID NO: 960 - DNA, 74 bp, Artificial Sequence
  Description of Artificial Sequence: Synthetic oligonucleotide
gaaattaatacgactcactatagggatgaatacagacatgaggcctgaaacagttttagagctatgctgttttg

SEQ ID NO: 961 - DNA, 74 bp, Artificial Sequence
  Description of Artificial Sequence: Synthetic oligonucleotide
gaaattaatacgactcactatagggatgaatagtatgagatacctaaccagagttttagagctatgctgttttg

SEQ ID NO: 962 - DNA, 74 bp, Artificial Sequence
  Description of Artificial Sequence: Synthetic oligonucleotide
gaaattaatacgactcactatagggatgaataccactgccagtgcagcaggcgttttagagctatgctgttttg

SEQ ID NO: 963 - DNA, 74 bp, Artificial Sequence
  Description of Artificial Sequence: Synthetic oligonucleotide
gaaattaatacgactcactatagggatgaataaaagacctggattcaagtccgttttagagctatgctgttttg

SEQ ID NO: 964 - DNA, 74 bp, Artificial Sequence
  Description of Artificial Sequence: Synthetic oligonucleotide
gaaattaatacgactcactatagggatgaatataacatggttagtaggcaacgttttagagctatgctgttttg

SEQ ID NO: 965 - DNA, 74 bp, Artificial Sequence
  Description of Artificial Sequence: Synthetic oligonucleotide
gaaattaatacgactcactatagggatgaatagaatgtccctgaagtacagggttttagagctatgctgttttg

SEQ ID NO: 966 - DNA, 74 bp, Artificial Sequence
  Description of Artificial Sequence: Synthetic oligonucleotide
gaaattaatacgactcactatagggatgaatatttccccttataaacaacaggttttagagctatgctgttttg

SEQ ID NO: 967 - DNA, 74 bp, Artificial Sequence
  Description of Artificial Sequence: Synthetic oligonucleotide
gaaattaatacgactcactatagggatgaatacttaagaaagttcattgagagttttagagctatgctgttttg

SEQ ID NO: 968 - DNA, 74 bp, Artificial Sequence
  Description of Artificial Sequence: Synthetic oligonucleotide
gaaattaatacgactcactatagggatgaataaagagaaatacataaaatacgttttagagctatgctgttttg

SEQ ID NO: 969 - DNA, 74 bp, Artificial Sequence
  Description of Artificial Sequence: Synthetic oligonucleotide
gaaattaatacgactcactatagggatgaatattaagtacttgtcatggaccgttttagagctatgctgttttg

SEQ ID NO: 970 - DNA, 74 bp, Artificial Sequence
  Description of Artificial Sequence: Synthetic oligonucleotide
gaaattaatacgactcactatagggatgaatagagcagcttaccagctgtgggttttagagctatgctgttttg

SEQ ID NO: 971 - DNA, 74 bp, Artificial Sequence
  Description of Artificial Sequence: Synthetic oligonucleotide
gaaattaatacgactcactatagggatgaatagctcacagtccagtgagggagttttagagctatgctgttttg

SEQ ID NO: 972 - DNA, 74 bp, Artificial Sequence
  Description of Artificial Sequence: Synthetic oligonucleotide
gaaattaatacgactcactatagggatgaataaagaaagcgataattccgcagttttagagctatgctgttttg

SEQ ID NO: 973 - DNA, 74 bp, Artificial Sequence
  Description of Artificial Sequence: Synthetic oligonucleotide
gaaattaatacgactcactatagggatgaatagttgcacaaagtttttgggagttttagagctatgctgttttg

SEQ ID NO: 974 - DNA, 74 bp, Artificial Sequence
  Description of Artificial Sequence: Synthetic oligonucleotide
gaaattaatacgactcactatagggatgaataggggctctcagatcacacaagttttagagctatgctgttttg

SEQ ID NO: 975 - DNA, 74 bp, Artificial Sequence
  Description of Artificial Sequence: Synthetic oligonucleotide
gaaattaatacgactcactatagggatgaatatcagttgaatactgccccaggttttagagctatgctgttttg

SEQ ID NO: 976 - DNA, 74 bp, Artificial Sequence
  Description of Artificial Sequence: Synthetic oligonucleotide
gaaattaatacgactcactatagggatgaataaaaaaaaaagtgcaagccaagttttagagctatgctgttttg

SEQ ID NO: 977 - DNA, 74 bp, Artificial Sequence
  Description of Artificial Sequence: Synthetic oligonucleotide
gaaattaatacgactcactatagggatgaatacttcagagagtgagggcagagttttagagctatgctgttttg

SEQ ID NO: 978 - DNA, 74 bp, Artificial Sequence
  Description of Artificial Sequence: Synthetic oligonucleotide
gaaattaatacgactcactatagggatgaatagagcaaaagacaatggacaagttttagagctatgctgttttg

SEQ ID NO: 979 - DNA, 74 bp, Artificial Sequence
  Description of Artificial Sequence: Synthetic oligonucleotide
gaaattaatacgactcactatagggatgaataaggacaagtctacatgaaaagttttagagctatgctgttttg

SEQ ID NO: 980 - DNA, 74 bp, Artificial Sequence
  Description of Artificial Sequence: Synthetic oligonucleotide
gaaattaatacgactcactatagggatgaatatgaaagggtggcagtcctcagttttagagctatgctgttttg

SEQ ID NO: 981 - DNA, 74 bp, Artificial Sequence
  Description of Artificial Sequence: Synthetic oligonucleotide
gaaattaatacgactcactatagggatgaatactgcaggcagatttgactgggttttagagctatgctgttttg

SEQ ID NO: 982 - DNA, 74 bp, Artificial Sequence
  Description of Artificial Sequence: Synthetic oligonucleotide
gaaattaatacgactcactatagggatgaatatcagaaggtacctgaacaaagttttagagctatgctgttttg

SEQ ID NO: 983 - DNA, 74 bp, Artificial Sequence
  Description of Artificial Sequence: Synthetic oligonucleotide
gaaattaatacgactcactatagggatgaataaggaatgcttcaggtacccagttttagagctatgctgttttg

SEQ ID NO: 984 - DNA, 74 bp, Artificial Sequence
  Description of Artificial Sequence: Synthetic oligonucleotide
gaaattaatacgactcactatagggatgaatagcgggggcggggggaagaaagttttagagctatgctgttttg

SEQ ID NO: 985 - DNA, 74 bp, Artificial Sequence
  Description of Artificial Sequence: Synthetic oligonucleotide
gaaattaatacgactcactatagggatgaataataaaaaagctattgtaccggttttagagctatgctgttttg

SEQ ID NO: 986 - DNA, 74 bp, Artificial Sequence
  Description of Artificial Sequence: Synthetic oligonucleotide
gaaattaatacgactcactatagggatgaataagtgttgttatgtcctatgagttttagagctatgctgttttg

SEQ ID NO: 987 - DNA, 74 bp, Artificial Sequence
  Description of Artificial Sequence: Synthetic oligonucleotide
gaaattaatacgactcactatagggatgaatatcttgtgtgcagttgcagaagttttagagctatgctgttttg

SEQ ID NO: 988 - DNA, 74 bp, Artificial Sequence
  Description of Artificial Sequence: Synthetic oligonucleotide
gaaattaatacgactcactatagggatgaataacaaggtgaaactgtagtgcgttttagagctatgctgttttg

SEQ ID NO: 989 - DNA, 74 bp, Artificial Sequence
  Description of Artificial Sequence: Synthetic oligonucleotide
gaaattaatacgactcactatagggatgaatattgatccaaatacactataagttttagagctatgctgttttg

SEQ ID NO: 990 - DNA, 74 bp, Artificial Sequence
  Description of Artificial Sequence: Synthetic oligonucleotide
gaaattaatacgactcactatagggatgaatattgaagttggctttgggtcagttttagagctatgctgttttg

SEQ ID NO: 991 - DNA, 74 bp, Artificial Sequence
  Description of Artificial Sequence: Synthetic oligonucleotide
gaaattaatacgactcactatagggatgaatagcaccttagaagacctgagggttttagagctatgctgttttg

SEQ ID NO: 992 - DNA, 74 bp, Artificial Sequence
  Description of Artificial Sequence: Synthetic oligonucleotide
gaaattaatacgactcactatagggatgaataactccccctggctctgaacagttttagagctatgctgttttg

SEQ ID NO: 993 - DNA, 74 bp, Artificial Sequence
  Description of Artificial Sequence: Synthetic oligonucleotide
gaaattaatacgactcactatagggatgaataggaatggggcaacgctcgcagttttagagctatgctgttttg

SEQ ID NO: 994 - DNA, 74 bp, Artificial Sequence
  Description of Artificial Sequence: Synthetic oligonucleotide
gaaattaatacgactcactatagggatgaataagatatcaaggtaattacccgttttagagctatgctgttttg

SEQ ID NO: 995 - DNA, 74 bp, Artificial Sequence
  Description of Artificial Sequence: Synthetic oligonucleotide
gaaattaatacgactcactatagggatgaatactggagggggcttgaaaacagttttagagctatgctgttttg

SEQ ID NO: 996 - DNA, 74 bp, Artificial Sequence
  Description of Artificial Sequence: Synthetic oligonucleotide
gaaattaatacgactcactatagggatgaataaaagtcttcttgtttaccccgttttagagctatgctgttttg

SEQ ID NO: 997 - DNA, 74 bp, Artificial Sequence
  Description of Artificial Sequence: Synthetic oligonucleotide
gaaattaatacgactcactatagggatgaatacttgaaacatttaaaagcccgttttagagctatgctgttttg

SEQ ID NO: 998 - DNA, 74 bp, Artificial Sequence
  Description of Artificial Sequence: Synthetic oligonucleotide
gaaattaatacgactcactatagggatgaatagaagtaccaacaacgggagagttttagagctatgctgttttg

SEQ ID NO: 999 - DNA, 74 bp, Artificial Sequence
  Description of Artificial Sequence: Synthetic oligonucleotide
gaaattaatacgactcactatagggatgaatatagagtacttgcaaatggaagttttagagctatgctgttttg

SEQ ID NO: 1000 - DNA, 74 bp, Artificial Sequence
  Description of Artificial Sequence: Synthetic oligonucleotide
gaaattaatacgactcactatagggatgaataaggtcaagagcagtggaggagttttagagctatgctgttttg

SEQ ID NO: 1001 - DNA, 74 bp, Artificial Sequence
  Description of Artificial Sequence: Synthetic oligonucleotide
gaaattaatacgactcactatagggatgaataggactccagtccacgaaggagttttagagctatgctgttttg

SEQ ID NO: 1002 - DNA, 74 bp, Artificial Sequence
  Description of Artificial Sequence: Synthetic oligonucleotide
gaaattaatacgactcactatagggatgaataaaatatataatacagcatccgttttagagctatgctgttttg

SEQ ID NO: 1003 - DNA, 74 bp, Artificial Sequence
  Description of Artificial Sequence: Synthetic oligonucleotide
gaaattaatacgactcactatagggatgaataattgagtgtcaaaagtgcaagttttagagctatgctgttttg

SEQ ID NO: 1004 - DNA, 74 bp, Artificial Sequence
  Description of Artificial Sequence: Synthetic oligonucleotide
gaaattaatacgactcactatagggatgaatatgtttttcttataaatacaagttttagagctatgctgttttg

SEQ ID NO: 1005 - DNA, 74 bp, Artificial Sequence
  Description of Artificial Sequence: Synthetic oligonucleotide
gaaattaatacgactcactatagggatgaatactttcccacaccaggaccaggttttagagctatgctgttttg

SEQ ID NO: 1006 - DNA, 74 bp, Artificial Sequence
  Description of Artificial Sequence: Synthetic oligonucleotide
gaaattaatacgactcactatagggatgaataagtgaaaccacagatagcaggttttagagctatgctgttttg

SEQ ID NO: 1007 - DNA, 74 bp, Artificial Sequence
  Description of Artificial Sequence: Synthetic oligonucleotide
gaaattaatacgactcactatagggatgaatactgttggggcaggtgcatgggttttagagctatgctgttttg

SEQ ID NO: 1008 - DNA, 74 bp, Artificial Sequence
  Description of Artificial Sequence: Synthetic oligonucleotide
gaaattaatacgactcactatagggatgaatatctacaggctccacaggcaggttttagagctatgctgttttg

SEQ ID NO: 1009 - DNA, 74 bp, Artificial Sequence
  Description of Artificial Sequence: Synthetic oligonucleotide
gaaattaatacgactcactatagggatgaatagttctaggaaagtaaaaacagttttagagctatgctgttttg

SEQ ID NO: 1010 - DNA, 74 bp, Artificial Sequence
  Description of Artificial Sequence: Synthetic oligonucleotide
gaaattaatacgactcactatagggatgaatatgtcaaacaggaaatgagcagttttagagctatgctgttttg

SEQ ID NO: 1011 - DNA, 74 bp, Artificial Sequence
  Description of Artificial Sequence: Synthetic oligonucleotide
gaaattaatacgactcactatagggatgaataacttagttcataatttccccgttttagagctatgctgttttg

SEQ ID NO: 1012 - DNA, 74 bp, Artificial Sequence
  Description of Artificial Sequence: Synthetic oligonucleotide
gaaattaatacgactcactatagggatgaatactgggcagacagctgccaaagttttagagctatgctgttttg

SEQ ID NO: 1013 - DNA, 74 bp, Artificial Sequence
  Description of Artificial Sequence: Synthetic oligonucleotide
gaaattaatacgactcactatagggatgaatacttattactttttattgaaagttttagagctatgctgttttg

SEQ ID NO: 1014 - DNA, 74 bp, Artificial Sequence
  Description of Artificial Sequence: Synthetic oligonucleotide
gaaattaatacgactcactatagggatgaatagcaacccacctcttccggaagttttagagctatgctgttttg

SEQ ID NO: 1015 - DNA, 74 bp, Artificial Sequence
  Description of Artificial Sequence: Synthetic oligonucleotide
gaaattaatacgactcactatagggatgaatatgaaaacatgtcttagcacagttttagagctatgctgttttg

SEQ ID NO: 1016 - DNA, 74 bp, Artificial Sequence
  Description of Artificial Sequence: Synthetic oligonucleotide
gaaattaatacgactcactatagggatgaatattgtttcctcaagtggaaaagttttagagctatgctgttttg

SEQ ID NO: 1017 - DNA, 74 bp, Artificial Sequence
  Description of Artificial Sequence: Synthetic oligonucleotide
gaaattaatacgactcactatagggatgaataataagagtttaagtgggccagttttagagctatgctgttttg

SEQ ID NO: 1018 - DNA, 74 bp, Artificial Sequence
  Description of Artificial Sequence: Synthetic oligonucleotide
gaaattaatacgactcactatagggatgaatacataaacaatatgtaaaaaagttttagagctatgctgttttg

SEQ ID NO: 1019 - DNA, 74 bp, Artificial Sequence
  Description of Artificial Sequence: Synthetic oligonucleotide
gaaattaatacgactcactatagggatgaatataacaaacgcctatagatcagttttagagctatgctgttttg

SEQ ID NO: 1020 - DNA, 74 bp, Artificial Sequence
  Description of Artificial Sequence: Synthetic oligonucleotide
gaaattaatacgactcactatagggatgaataccatagagaaagaggtaggagttttagagctatgctgttttg

SEQ ID NO: 1021 - DNA, 74 bp, Artificial Sequence
  Description of Artificial Sequence: Synthetic oligonucleotide
gaaattaatacgactcactatagggatgaatagaaaaatacaatgataatgagttttagagctatgctgttttg

SEQ ID NO: 1022 - DNA, 74 bp, Artificial Sequence
  Description of Artificial Sequence: Synthetic oligonucleotide
gaaattaatacgactcactatagggatgaatataggtatacacgcgccatgggttttagagctatgctgttttg

SEQ ID NO: 1023 - DNA, 74 bp, Artificial Sequence
  Description of Artificial Sequence: Synthetic oligonucleotide
gaaattaatacgactcactatagggatgaataaatcagactagtgattgccagttttagagctatgctgttttg

SEQ ID NO: 1024 - DNA, 74 bp, Artificial Sequence
  Description of Artificial Sequence: Synthetic oligonucleotide
gaaattaatacgactcactatagggatgaataattcagtataaggaaggaaagttttagagctatgctgttttg

SEQ ID NO: 1025 - DNA, 74 bp, Artificial Sequence
  Description of Artificial Sequence: Synthetic oligonucleotide
gaaattaatacgactcactatagggatgaatatctatggacatgcattagcagttttagagctatgctgttttg

SEQ ID NO: 1026 - DNA, 74 bp, Artificial Sequence
  Description of Artificial Sequence: Synthetic oligonucleotide
gaaattaatacgactcactatagggatgaatagttagaagctatatcaagaggttttagagctatgctgttttg

SEQ ID NO: 1027 - DNA, 74 bp, Artificial Sequence
  Description of Artificial Sequence: Synthetic oligonucleotide
gaaattaatacgactcactatagggatgaataagtacaacgtaagtttcagggttttagagctatgctgttttg

SEQ ID NO: 1028 - DNA, 74 bp, Artificial Sequence
  Description of Artificial Sequence: Synthetic oligonucleotide
gaaattaatacgactcactatagggatgaatattgataacagggacccctgcgttttagagctatgctgttttg

SEQ ID NO: 1029 - DNA, 74 bp, Artificial Sequence
  Description of Artificial Sequence: Synthetic oligonucleotide
gaaattaatacgactcactatagggatgaatagttaagcacacttagcccaggttttagagctatgctgttttg

SEQ ID NO: 1030 - DNA, 74 bp, Artificial Sequence
  Description of Artificial Sequence: Synthetic oligonucleotide
gaaattaatacgactcactatagggatgaatagtgtaacacatagtgacaaggttttagagctatgctgttttg

SEQ ID NO: 1031 - DNA, 74 bp, Artificial Sequence
  Description of Artificial Sequence: Synthetic oligonucleotide
gaaattaatacgactcactatagggatgaatacgtgcagtatttggttagaagttttagagctatgctgttttg

SEQ ID NO: 1032 - DNA, 74 bp, Artificial Sequence
  Description of Artificial Sequence: Synthetic oligonucleotide
gaaattaatacgactcactatagggatgaatattttttgcccatttttaaaagttttagagctatgctgttttg

SEQ ID NO: 1033 - DNA, 74 bp, Artificial Sequence
  Description of Artificial Sequence: Synthetic oligonucleotide
gaaattaatacgactcactatagggatgaataagaggatagagactagagcagttttagagctatgctgttttg

SEQ ID NO: 1034 - DNA, 74 bp, Artificial Sequence
  Description of Artificial Sequence: Synthetic oligonucleotide
gaaattaatacgactcactatagggatgaatagtatatgaagctctgaggaagttttagagctatgctgttttg

SEQ ID NO: 1035 - DNA, 74 bp, Artificial Sequence
  Description of Artificial Sequence: Synthetic oligonucleotide
gaaattaatacgactcactatagggatgaatacttttacaccaacctaataggttttagagctatgctgttttg

SEQ ID NO: 1036 - DNA, 74 bp, Artificial Sequence
  Description of Artificial Sequence: Synthetic oligonucleotide
gaaattaatacgactcactatagggatgaataagacatggttttagaaataggttttagagctatgctgttttg

SEQ ID NO: 1037 - DNA, 74 bp, Artificial Sequence
  Description of Artificial Sequence: Synthetic oligonucleotide
gaaattaatacgactcactatagggatgaataaggaacataattgtaaccacgttttagagctatgctgttttg

SEQ ID NO: 1038 - DNA, 74 bp, Artificial Sequence
  Description of Artificial Sequence: Synthetic oligonucleotide
gaaattaatacgactcactatagggatgaataggacactggtgcctaaataagttttagagctatgctgttttg

SEQ ID NO: 1039 - DNA, 74 bp, Artificial Sequence
  Description of Artificial Sequence: Synthetic oligonucleotide
gaaattaatacgactcactatagggatgaatactggcatcatggttttgtcagttttagagctatgctgttttg

SEQ ID NO: 1040 - DNA, 74 bp, Artificial Sequence
  Description of Artificial Sequence: Synthetic oligonucleotide
gaaattaatacgactcactatagggatgaatagagaggcgtttatatgagaagttttagagctatgctgttttg

SEQ ID NO: 1041 - DNA, 74 bp, Artificial Sequence
  Description of Artificial Sequence: Synthetic oligonucleotide
gaaattaatacgactcactatagggatgaatatggcaagtgggccttgaaaagttttagagctatgctgttttg

SEQ ID NO: 1042 - DNA, 74 bp, Artificial Sequence
  Description of Artificial Sequence: Synthetic oligonucleotide
gaaattaatacgactcactatagggatgaatacaattgatgggaaaatgtaagttttagagctatgctgttttg

SEQ ID NO: 1043 - DNA, 74 bp, Artificial Sequence
  Description of Artificial Sequence: Synthetic oligonucleotide
gaaattaatacgactcactatagggatgaatacaggtatatctggtctgtgggttttagagctatgctgttttg

SEQ ID NO: 1044 - DNA, 74 bp, Artificial Sequence
  Description of Artificial Sequence: Synthetic oligonucleotide
gaaattaatacgactcactatagggatgaatactacctctctgactctcacagttttagagctatgctgttttg

SEQ ID NO: 1045 - DNA, 74 bp, Artificial Sequence
  Description of Artificial Sequence: Synthetic oligonucleotide
gaaattaatacgactcactatagggatgaatacagtaggaattttaacccgggttttagagctatgctgttttg

SEQ ID NO: 1046 - DNA, 74 bp, Artificial Sequence
  Description of Artificial Sequence: Synthetic oligonucleotide
gaaattaatacgactcactatagggatgaataattctcagcaaactatcgcagttttagagctatgctgttttg

SEQ ID NO: 1047 - DNA, 74 bp, Artificial Sequence
  Description of Artificial Sequence: Synthetic oligonucleotide
gaaattaatacgactcactatagggatgaataacagcaggggctggcagtgggttttagagctatgctgttttg

SEQ ID NO: 1048 - DNA, 74 bp, Artificial Sequence
  Description of Artificial Sequence: Synthetic oligonucleotide
gaaattaatacgactcactatagggatgaatacctgcttctctgcagtggccgttttagagctatgctgttttg

SEQ ID NO: 1049 - DNA, 74 bp, Artificial Sequence
  Description of Artificial Sequence: Synthetic oligonucleotide
gaaattaatacgactcactatagggatgaataaggaacggaggcatcacggggttttagagctatgctgttttg

SEQ ID NO: 1050 - DNA, 74 bp, Artificial Sequence
  Description of Artificial Sequence: Synthetic oligonucleotide
gaaattaatacgactcactatagggatgaatacctgaggaacggagacatcagttttagagctatgctgttttg

SEQ ID NO: 1051 - DNA, 74 bp, Artificial Sequence
  Description of Artificial Sequence: Synthetic oligonucleotide
gaaattaatacgactcactatagggatgaatagcttaagcgcttaaaaatgagttttagagctatgctgttttg

SEQ ID NO: 1052 - DNA, 74 bp, Artificial Sequence
  Description of Artificial Sequence: Synthetic oligonucleotide
gaaattaatacgactcactatagggatgaataaagggtgtaggactcgccgcgttttagagctatgctgttttg

SEQ ID NO: 1053 - DNA, 74 bp, Artificial Sequence
  Description of Artificial Sequence: Synthetic oligonucleotide
gaaattaatacgactcactatagggatgaatacgttcatgaagatcacaaccgttttagagctatgctgttttg

SEQ ID NO: 1054 - DNA, 74 bp, Artificial Sequence
  Description of Artificial Sequence: Synthetic oligonucleotide
gaaattaatacgactcactatagggatgaatacatccccatagattgaatgcgttttagagctatgctgttttg

SEQ ID NO: 1055 - DNA, 74 bp, Artificial Sequence
  Description of Artificial Sequence: Synthetic oligonucleotide
gaaattaatacgactcactatagggatgaatatatggccccataaggtacccgttttagagctatgctgttttg

SEQ ID NO: 1056 - DNA, 74 bp, Artificial Sequence
  Description of Artificial Sequence: Synthetic oligonucleotide
gaaattaatacgactcactatagggatgaataagggagagacatcaatggcagttttagagctatgctgttttg

SEQ ID NO: 1057 - DNA, 74 bp, Artificial Sequence
  Description of Artificial Sequence: Synthetic oligonucleotide
gaaattaatacgactcactatagggatgaatagcttgactgtttgcatgaccgttttagagctatgctgttttg

SEQ ID NO: 1058 - DNA, 74 bp, Artificial Sequence
  Description of Artificial Sequence: Synthetic oligonucleotide
gaaattaatacgactcactatagggatgaatatttccagggctgaaaggggcgttttagagctatgctgttttg

SEQ ID NO: 1059 - DNA, 74 bp, Artificial Sequence
  Description of Artificial Sequence: Synthetic oligonucleotide
gaaattaatacgactcactatagggatgaataccacctggagtccccagacggttttagagctatgctgttttg

SEQ ID NO: 1060 - DNA, 74 bp, Artificial Sequence
  Description of Artificial Sequence: Synthetic oligonucleotide
gaaattaatacgactcactatagggatgaataatggtcctcgccctgactccgttttagagctatgctgttttg

SEQ ID NO: 1061 - DNA, 74 bp, Artificial Sequence
  Description of Artificial Sequence: Synthetic oligonucleotide
gaaattaatacgactcactatagggatgaatacagcaatgctgcttttgtcagttttagagctatgctgttttg

SEQ ID NO: 1062 - DNA, 74 bp, Artificial Sequence
  Description of Artificial Sequence: Synthetic oligonucleotide
gaaattaatacgactcactatagggatgaataaagagcattgacatgactgcgttttagagctatgctgttttg

SEQ ID NO: 1063 - DNA, 74 bp, Artificial Sequence
  Description of Artificial Sequence: Synthetic oligonucleotide
gaaattaatacgactcactatagggatgaatacatgggattagcctcagtccgttttagagctatgctgttttg

SEQ ID NO: 1064 - DNA, 74 bp, Artificial Sequence
  Description of Artificial Sequence: Synthetic oligonucleotide
gaaattaatacgactcactatagggatgaatataactgcattatttttcaaagttttagagctatgctgttttg

SEQ ID NO: 1065 - DNA, 74 bp, Artificial Sequence
  Description of Artificial Sequence: Synthetic oligonucleotide
gaaattaatacgactcactatagggatgaatagagttttgagaataagcaaggttttagagctatgctgttttg

SEQ ID NO: 1066 - DNA, 74 bp, Artificial Sequence
  Description of Artificial Sequence: Synthetic oligonucleotide
gaaattaatacgactcactatagggatgaatatgtttgagtcatgatagaaagttttagagctatgctgttttg

SEQ ID NO: 1067 - DNA, 74 bp, Artificial Sequence
  Description of Artificial Sequence: Synthetic oligonucleotide
gaaattaatacgactcactatagggatgaatatagcttaaagccagatagaagttttagagctatgctgttttg

SEQ ID NO: 1068 - DNA, 74 bp, Artificial Sequence
  Description of Artificial Sequence: Synthetic oligonucleotide
gaaattaatacgactcactatagggatgaatacagatgcccttagggagtaggttttagagctatgctgttttg

SEQ ID NO: 1069 - DNA, 74 bp, Artificial Sequence
  Description of Artificial Sequence: Synthetic oligonucleotide
gaaattaatacgactcactatagggatgaataaaggaatagtactgaggtgggttttagagctatgctgttttg

SEQ ID NO: 1070 - DNA, 74 bp, Artificial Sequence
  Description of Artificial Sequence: Synthetic oligonucleotide
gaaattaatacgactcactatagggatgaataaaaagaaaggctctatccacgttttagagctatgctgttttg

SEQ ID NO: 1071 - DNA, 74 bp, Artificial Sequence
  Description of Artificial Sequence: Synthetic oligonucleotide
gaaattaatacgactcactatagggatgaataatgccctatggggaacgtgagttttagagctatgctgttttg

SEQ ID NO: 1072 - DNA, 74 bp, Artificial Sequence
  Description of Artificial Sequence: Synthetic oligonucleotide
gaaattaatacgactcactatagggatgaatatcaacttcacaaccctgcccgttttagagctatgctgttttg

SEQ ID NO: 1073 - DNA, 74 bp, Artificial Sequence
  Description of Artificial Sequence: Synthetic oligonucleotide
gaaattaatacgactcactatagggatgaatagagtagattattttctgtccgttttagagctatgctgttttg

SEQ ID NO: 1074 - DNA, 74 bp, Artificial Sequence
  Description of Artificial Sequence: Synthetic oligonucleotide
gaaattaatacgactcactatagggatgaatacggaaccataggctttagccgttttagagctatgctgttttg

SEQ ID NO: 1075 - DNA, 74 bp, Artificial Sequence
  Description of Artificial Sequence: Synthetic oligonucleotide
gaaattaatacgactcactatagggatgaatattgttaagctaaacatatcagttttagagctatgctgttttg

SEQ ID NO: 1076 - DNA, 74 bp, Artificial Sequence
  Description of Artificial Sequence: Synthetic oligonucleotide
gaaattaatacgactcactatagggatgaataaagattctatgggcagaagcgttttagagctatgctgttttg

SEQ ID NO: 1077 - DNA, 74 bp, Artificial Sequence
  Description of Artificial Sequence: Synthetic oligonucleotide
gaaattaatacgactcactatagggatgaataaaagacagttgtttggctaagttttagagctatgctgttttg

SEQ ID NO: 1078 - DNA, 74 bp, Artificial Sequence
  Description of Artificial Sequence: Synthetic oligonucleotide
gaaattaatacgactcactatagggatgaatagaggtgacctctagttctcagttttagagctatgctgttttg

SEQ ID NO: 1079 - DNA, 74 bp, Artificial Sequence
  Description of Artificial Sequence: Synthetic oligonucleotide
gaaattaatacgactcactatagggatgaataggtattcaaacacatgatacgttttagagctatgctgttttg

SEQ ID NO: 1080 - DNA, 74 bp, Artificial Sequence
  Description of Artificial Sequence: Synthetic oligonucleotide
gaaattaatacgactcactatagggatgaatatcacctccccgaggccctaggttttagagctatgctgttttg

SEQ ID NO: 1081 - DNA, 74 bp, Artificial Sequence
  Description of Artificial Sequence: Synthetic oligonucleotide
gaaattaatacgactcactatagggatgaatacatccatgttcgggcactcagttttagagctatgctgttttg

SEQ ID NO: 1082 - DNA, 74 bp, Artificial Sequence
  Description of Artificial Sequence: Synthetic oligonucleotide
gaaattaatacgactcactatagggatgaatatgttgattccctgaaaggcagttttagagctatgctgttttg

SEQ ID NO: 1083 - DNA, 74 bp, Artificial Sequence
  Description of Artificial Sequence: Synthetic oligonucleotide
gaaattaatacgactcactatagggatgaatattgtctcttggcatggcccagttttagagctatgctgttttg

SEQ ID NO: 1084 - DNA, 74 bp, Artificial Sequence
  Description of Artificial Sequence: Synthetic oligonucleotide
gaaattaatacgactcactatagggatgaataacttcccttttgctgactgggttttagagctatgctgttttg

SEQ ID NO: 1085 - DNA, 74 bp, Artificial Sequence
  Description of Artificial Sequence: Synthetic oligonucleotide
gaaattaatacgactcactatagggatgaataccatggagctcctgttctccgttttagagctatgctgttttg

SEQ ID NO: 1086 - DNA, 74 bp, Artificial Sequence
  Description of Artificial Sequence: Synthetic oligonucleotide
gaaattaatacgactcactatagggatgaatagcagcagggagagactaccagttttagagctatgctgttttg

SEQ ID NO: 1087 - DNA, 74 bp, Artificial Sequence
  Description of Artificial Sequence: Synthetic oligonucleotide
gaaattaatacgactcactatagggatgaatacatgagttcttactggaagggttttagagctatgctgttttg

SEQ ID NO: 1088 - DNA, 74 bp, Artificial Sequence
  Description of Artificial Sequence: Synthetic oligonucleotide
gaaattaatacgactcactatagggatgaatacagcatatcttcctttgtaagttttagagctatgctgttttg

SEQ ID NO: 1089 - DNA, 74 bp, Artificial Sequence
  Description of Artificial Sequence: Synthetic oligonucleotide
gaaattaatacgactcactatagggatgaatatagaagagccagtgaacacagttttagagctatgctgttttg

SEQ ID NO: 1090 - DNA, 74 bp, Artificial Sequence
  Description of Artificial Sequence: Synthetic oligonucleotide
gaaattaatacgactcactatagggatgaataaaacttctataagcagggaggttttagagctatgctgttttg

SEQ ID NO: 1091 - DNA, 74 bp, Artificial Sequence
  Description of Artificial Sequence: Synthetic oligonucleotide
gaaattaatacgactcactatagggatgaatatttggataaaatacagctgcgttttagagctatgctgttttg

SEQ ID NO: 1092 - DNA, 74 bp, Artificial Sequence
  Description of Artificial Sequence: Synthetic oligonucleotide
gaaattaatacgactcactatagggatgaataaagaggctgcgaagaagagcgttttagagctatgctgttttg

SEQ ID NO: 1093 - DNA, 74 bp, Artificial Sequence
  Description of Artificial Sequence: Synthetic oligonucleotide
gaaattaatacgactcactatagggatgaataaaataaaacctaggctctacgttttagagctatgctgttttg

SEQ ID NO: 1094 - DNA, 74 bp, Artificial Sequence
  Description of Artificial Sequence: Synthetic oligonucleotide
gaaattaatacgactcactatagggatgaatataataagagatttacgaagggttttagagctatgctgttttg

SEQ ID NO: 1095 - DNA, 74 bp, Artificial Sequence
  Description of Artificial Sequence: Synthetic oligonucleotide
gaaattaatacgactcactatagggatgaataagtgaagtagttcaagggaggttttagagctatgctgttttg

SEQ ID NO: 1096 - DNA, 74 bp, Artificial Sequence
  Description of Artificial Sequence: Synthetic oligonucleotide
gaaattaatacgactcactatagggatgaatatgtctttgtggaaaaaaagagttttagagctatgctgttttg

SEQ ID NO: 1097 - DNA, 74 bp, Artificial Sequence
  Description of Artificial Sequence: Synthetic oligonucleotide
gaaattaatacgactcactatagggatgaatacctctttaacaacctgcacagttttagagctatgctgttttg

SEQ ID NO: 1098 - DNA, 74 bp, Artificial Sequence
  Description of Artificial Sequence: Synthetic oligonucleotide
gaaattaatacgactcactatagggatgaatagcatgattgatgcaaaagacgttttagagctatgctgttttg

SEQ ID NO: 1099 - DNA, 74 bp, Artificial Sequence
  Description of Artificial Sequence: Synthetic oligonucleotide
gaaattaatacgactcactatagggatgaatactggttaatttgaataatacgttttagagctatgctgttttg

SEQ ID NO: 1100 - DNA, 74 bp, Artificial Sequence
  Description of Artificial Sequence: Synthetic oligonucleotide
gaaattaatacgactcactatagggatgaatattgctgatttcagagccaaagttttagagctatgctgttttg

SEQ ID NO: 1101 - DNA, 74 bp, Artificial Sequence
  Description of Artificial Sequence: Synthetic oligonucleotide
gaaattaatacgactcactatagggatgaatagctcatcacagattgaatgggttttagagctatgctgttttg

SEQ ID NO: 1102 - DNA, 74 bp, Artificial Sequence
  Description of Artificial Sequence: Synthetic oligonucleotide
gaaattaatacgactcactatagggatgaatatgttctgcaagtgtggaagcgttttagagctatgctgttttg

SEQ ID NO: 1103 - DNA, 74 bp, Artificial Sequence
  Description of Artificial Sequence: Synthetic oligonucleotide
gaaattaatacgactcactatagggatgaatacatagggtgtgactaccaaggttttagagctatgctgttttg

SEQ ID NO: 1104 - DNA, 74 bp, Artificial Sequence
  Description of Artificial Sequence: Synthetic oligonucleotide
gaaattaatacgactcactatagggatgaatagagagcgagcgagcaagtacgttttagagctatgctgttttg

SEQ ID NO: 1105 - DNA, 74 bp, Artificial Sequence
  Description of Artificial Sequence: Synthetic oligonucleotide
gaaattaatacgactcactatagggatgaatagaagcagcagctgatcaacagttttagagctatgctgttttg

SEQ ID NO: 1106 - DNA, 74 bp, Artificial Sequence
  Description of Artificial Sequence: Synthetic oligonucleotide
gaaattaatacgactcactatagggatgaatacagccccacaaaaaaacaacgttttagagctatgctgttttg

SEQ ID NO: 1107 - DNA, 74 bp, Artificial Sequence
  Description of Artificial Sequence: Synthetic oligonucleotide
gaaattaatacgactcactatagggatgaataagttctgcaacaatagaacagttttagagctatgctgttttg

SEQ ID NO: 1108 - DNA, 74 bp, Artificial Sequence
  Description of Artificial Sequence: Synthetic oligonucleotide
gaaattaatacgactcactatagggatgaatagggggaaatgggtggagccagttttagagctatgctgttttg

SEQ ID NO: 1109 - DNA, 74 bp, Artificial Sequence
  Description of Artificial Sequence: Synthetic oligonucleotide
gaaattaatacgactcactatagggatgaatacagatgcttttgtgtagacggttttagagctatgctgttttg

SEQ ID NO: 1110 - DNA, 74 bp, Artificial Sequence
  Description of Artificial Sequence: Synthetic oligonucleotide
gaaattaatacgactcactatagggatgaataccaacagaacactgcaaaaagttttagagctatgctgttttg

SEQ ID NO: 1111 - DNA, 74 bp, Artificial Sequence
  Description of Artificial Sequence: Synthetic oligonucleotide
gaaattaatacgactcactatagggatgaataccaatacaggccccaagagagttttagagctatgctgttttg

SEQ ID NO: 1112 - DNA, 74 bp, Artificial Sequence
  Description of Artificial Sequence: Synthetic oligonucleotide
gaaattaatacgactcactatagggatgaataataacaatactcttatgtgcgttttagagctatgctgttttg

SEQ ID NO: 1113 - DNA, 74 bp, Artificial Sequence
  Description of Artificial Sequence: Synthetic oligonucleotide
gaaattaatacgactcactatagggatgaataccacttatataaaaaaatcggttttagagctatgctgttttg

SEQ ID NO: 1114 - DNA, 74 bp, Artificial Sequence
  Description of Artificial Sequence: Synthetic oligonucleotide
gaaattaatacgactcactatagggatgaatattaaaatagtggagccctcagttttagagctatgctgttttg

SEQ ID NO: 1115 - DNA, 74 bp, Artificial Sequence
  Description of Artificial Sequence: Synthetic oligonucleotide
gaaattaatacgactcactatagggatgaatagaagagccagcatccggtaagttttagagctatgctgttttg

SEQ ID NO: 1116 - DNA, 74 bp, Artificial Sequence
  Description of Artificial Sequence: Synthetic oligonucleotide
gaaattaatacgactcactatagggatgaatagtatgggaagaacagagacagttttagagctatgctgttttg

SEQ ID NO: 1117 - DNA, 74 bp, Artificial Sequence
  Description of Artificial Sequence: Synthetic oligonucleotide
gaaattaatacgactcactatagggatgaatagaaaaggaaactgagagggggttttagagctatgctgttttg

SEQ ID NO: 1118 - DNA, 74 bp, Artificial Sequence
  Description of Artificial Sequence: Synthetic oligonucleotide
gaaattaatacgactcactatagggatgaatattggtacttgtcccaaaggggttttagagctatgctgttttg

SEQ ID NO: 1119 - DNA, 74 bp, Artificial Sequence
  Description of Artificial Sequence: Synthetic oligonucleotide
gaaattaatacgactcactatagggatgaataataaagatataattaacacagttttagagctatgctgttttg

SEQ ID NO: 1120 - DNA, 74 bp, Artificial Sequence
  Description of Artificial Sequence: Synthetic oligonucleotide
gaaattaatacgactcactatagggatgaatatgttctggtagatatcatgagttttagagctatgctgttttg

SEQ ID NO: 1121 - DNA, 74 bp, Artificial Sequence
  Description of Artificial Sequence: Synthetic oligonucleotide
gaaattaatacgactcactatagggatgaatacagttacaggataggaatgggttttagagctatgctgttttg

SEQ ID NO: 1122 - DNA, 74 bp, Artificial Sequence
  Description of Artificial Sequence: Synthetic oligonucleotide
gaaattaatacgactcactatagggatgaatagatcgattaactaaatgtaagttttagagctatgctgttttg

SEQ ID NO: 1123 - DNA, 74 bp, Artificial Sequence
  Description of Artificial Sequence: Synthetic oligonucleotide
gaaattaatacgactcactatagggatgaataacaaatggtgctgagacaacgttttagagctatgctgttttg

SEQ ID NO: 1124 - DNA, 74 bp, Artificial Sequence
  Description of Artificial Sequence: Synthetic oligonucleotide
gaaattaatacgactcactatagggatgaataagaagaacagcatcttagcggttttagagctatgctgttttg

SEQ ID NO: 1125 - DNA, 74 bp, Artificial Sequence
  Description of Artificial Sequence: Synthetic oligonucleotide
gaaattaatacgactcactatagggatgaatattgcatggtcaaaagaaaaagttttagagctatgctgttttg

SEQ ID NO: 1126 - DNA, 74 bp, Artificial Sequence
  Description of Artificial Sequence: Synthetic oligonucleotide
gaaattaatacgactcactatagggatgaatatgtgtgtgtgcttggacacagttttagagctatgctgttttg

SEQ ID NO: 1127 - DNA, 74 bp, Artificial Sequence
  Description of Artificial Sequence: Synthetic oligonucleotide
gaaattaatacgactcactatagggatgaataattattttaaagacacatacgttttagagctatgctgttttg

SEQ ID NO: 1128 - DNA, 74 bp, Artificial Sequence
  Description of Artificial Sequence: Synthetic oligonucleotide
gaaattaatacgactcactatagggatgaataataatattcaagcaaaaggcgttttagagctatgctgttttg

SEQ ID NO: 1129 - DNA, 74 bp, Artificial Sequence
  Description of Artificial Sequence: Synthetic oligonucleotide
gaaattaatacgactcactatagggatgaatatcaatttacaaaccaaaagggttttagagctatgctgttttg

SEQ ID NO: 1130 - DNA, 74 bp, Artificial Sequence
  Description of Artificial Sequence: Synthetic oligonucleotide
gaaattaatacgactcactatagggatgaatagtgttcatgtaactgggcaagttttagagctatgctgttttg

SEQ ID NO: 1131 - DNA, 74 bp, Artificial Sequence
  Description of Artificial Sequence: Synthetic oligonucleotide
gaaattaatacgactcactatagggatgaatactaccaagtgatctttgcaagttttagagctatgctgttttg

SEQ ID NO: 1132 - DNA, 74 bp, Artificial Sequence
  Description of Artificial Sequence: Synthetic oligonucleotide
gaaattaatacgactcactatagggatgaataatataagggtaaagaaggaagttttagagctatgctgttttg

SEQ ID NO: 1133 - DNA, 74 bp, Artificial Sequence
  Description of Artificial Sequence: Synthetic oligonucleotide
gaaattaatacgactcactatagggatgaatagattattgctaatgatatcagttttagagctatgctgttttg

SEQ ID NO: 1134 - DNA, 74 bp, Artificial Sequence
  Description of Artificial Sequence: Synthetic oligonucleotide
gaaattaatacgactcactatagggatgaatattgctcaggctggagggcaggttttagagctatgctgttttg

SEQ ID NO: 1135 - DNA, 74 bp, Artificial Sequence
  Description of Artificial Sequence: Synthetic oligonucleotide
gaaattaatacgactcactatagggatgaatattaaacagaaccaggtgtaagttttagagctatgctgttttg

SEQ ID NO: 1136 - DNA, 74 bp, Artificial Sequence
  Description of Artificial Sequence: Synthetic oligonucleotide
gaaattaatacgactcactatagggatgaatagagatttaaatcatggcggggttttagagctatgctgttttg

SEQ ID NO: 1137 - DNA, 74 bp, Artificial Sequence
  Description of Artificial Sequence: Synthetic oligonucleotide
gaaattaatacgactcactatagggatgaataatgaaaattactaaagatcagttttagagctatgctgttttg

SEQ ID NO: 1138 - DNA, 74 bp, Artificial Sequence
  Description of Artificial Sequence: Synthetic oligonucleotide
gaaattaatacgactcactatagggatgaatatggaaatattgcatgggtaagttttagagctatgctgttttg

SEQ ID NO: 1139 - DNA, 74 bp, Artificial Sequence
  Description of Artificial Sequence: Synthetic oligonucleotide
gaaattaatacgactcactatagggatgaatagtgtttagtgtgcatggtcagttttagagctatgctgttttg

SEQ ID NO: 1140 - DNA, 74 bp, Artificial Sequence
  Description of Artificial Sequence: Synthetic oligonucleotide
gaaattaatacgactcactatagggatgaatattgcctagaggatgaaaaaagttttagagctatgctgttttg

SEQ ID NO: 1141 - DNA, 74 bp, Artificial Sequence
  Description of Artificial Sequence: Synthetic oligonucleotide
gaaattaatacgactcactatagggatgaatattgtaagctctatatgggcagttttagagctatgctgttttg

SEQ ID NO: 1142 - DNA, 74 bp, Artificial Sequence
  Description of Artificial Sequence: Synthetic oligonucleotide
gaaattaatacgactcactatagggatgaatataggatcacttagtttctaagttttagagctatgctgttttg

SEQ ID NO: 1143 - DNA, 74 bp, Artificial Sequence
  Description of Artificial Sequence: Synthetic oligonucleotide
gaaattaatacgactcactatagggatgaatacagctgcactgagggaaaaggttttagagctatgctgttttg

SEQ ID NO: 1144 - DNA, 74 bp, Artificial Sequence
  Description of Artificial Sequence: Synthetic oligonucleotide
gaaattaatacgactcactatagggatgaatatcaacttggttcaacagaaagttttagagctatgctgttttg

SEQ ID NO: 1145 - DNA, 74 bp, Artificial Sequence
  Description of Artificial Sequence: Synthetic oligonucleotide
gaaattaatacgactcactatagggatgaataagaagaaagagagggagtaggttttagagctatgctgttttg

SEQ ID NO: 1146 - DNA, 74 bp, Artificial Sequence
  Description of Artificial Sequence: Synthetic oligonucleotide
gaaattaatacgactcactatagggatgaatagatttgcttgcttgatatgagttttagagctatgctgttttg

SEQ ID NO: 1147 - DNA, 74 bp, Artificial Sequence
  Description of Artificial Sequence: Synthetic oligonucleotide
gaaattaatacgactcactatagggatgaatatagcataaacacaagacgacgttttagagctatgctgttttg

SEQ ID NO: 1148 - DNA, 74 bp, Artificial Sequence
  Description of Artificial Sequence: Synthetic oligonucleotide
gaaattaatacgactcactatagggatgaataaaagacacaggaaaatgaaggttttagagctatgctgttttg

SEQ ID NO: 1149 - DNA, 74 bp, Artificial Sequence
  Description of Artificial Sequence: Synthetic oligonucleotide
gaaattaatacgactcactatagggatgaataaataacactccataataggagttttagagctatgctgttttg

SEQ ID NO: 1150 - DNA, 74 bp, Artificial Sequence
  Description of Artificial Sequence: Synthetic oligonucleotide
gaaattaatacgactcactatagggatgaataaatttgcaagacaaaaagaagttttagagctatgctgttttg

SEQ ID NO: 1151 - DNA, 74 bp, Artificial Sequence
  Description of Artificial Sequence: Synthetic oligonucleotide
gaaattaatacgactcactatagggatgaatacctcctataaatgggtaagagttttagagctatgctgttttg

SEQ ID NO: 1152 - DNA, 74 bp, Artificial Sequence
  Description of Artificial Sequence: Synthetic oligonucleotide
gaaattaatacgactcactatagggatgaatactgtaccaagaataaggaccgttttagagctatgctgttttg

SEQ ID NO: 1153 - DNA, 74 bp, Artificial Sequence
  Description of Artificial Sequence: Synthetic oligonucleotide
gaaattaatacgactcactatagggatgaataagtgaaaaataggctaaagagttttagagctatgctgttttg

SEQ ID NO: 1154 - DNA, 74 bp, Artificial Sequence
  Description of Artificial Sequence: Synthetic oligonucleotide
gaaattaatacgactcactatagggatgaataaagcatctctgtaaagagacgttttagagctatgctgttttg

SEQ ID NO: 1155 - DNA, 74 bp, Artificial Sequence
  Description of Artificial Sequence: Synthetic oligonucleotide
gaaattaatacgactcactatagggatgaatacaacatttctaggtgtaagagttttagagctatgctgttttg

SEQ ID NO: 1156 - DNA, 74 bp, Artificial Sequence
  Description of Artificial Sequence: Synthetic oligonucleotide
gaaattaatacgactcactatagggatgaatacaaaatttaagttagaaagggttttagagctatgctgttttg

SEQ ID NO: 1157 - DNA, 74 bp, Artificial Sequence
  Description of Artificial Sequence: Synthetic oligonucleotide
gaaattaatacgactcactatagggatgaataatagaccccaggtataaaacgttttagagctatgctgttttg

SEQ ID NO: 1158 - DNA, 74 bp, Artificial Sequence
  Description of Artificial Sequence: Synthetic oligonucleotide
gaaattaatacgactcactatagggatgaatactagactaggccagtactcagttttagagctatgctgttttg

SEQ ID NO: 1159 - DNA, 74 bp, Artificial Sequence
  Description of Artificial Sequence: Synthetic oligonucleotide
gaaattaatacgactcactatagggatgaatatgtatggaaaagagtaggaagttttagagctatgctgttttg

SEQ ID NO: 1160 - DNA, 74 bp, Artificial Sequence
  Description of Artificial Sequence: Synthetic oligonucleotide
gaaattaatacgactcactatagggatgaatatcatgcaaaatacacaaagagttttagagctatgctgttttg

SEQ ID NO: 1161 - DNA, 74 bp, Artificial Sequence
  Description of Artificial Sequence: Synthetic oligonucleotide
gaaattaatacgactcactatagggatgaatatctctttgtttaaagtgaaagttttagagctatgctgttttg

SEQ ID NO: 1162 - DNA, 74 bp, Artificial Sequence
  Description of Artificial Sequence: Synthetic oligonucleotide
gaaattaatacgactcactatagggatgaataatttactgacatgagcctgggttttagagctatgctgttttg

SEQ ID NO: 1163 - DNA, 74 bp, Artificial Sequence
  Description of Artificial Sequence: Synthetic oligonucleotide
gaaattaatacgactcactatagggatgaatagagtttttccttaatactcagttttagagctatgctgttttg

SEQ ID NO: 1164 - DNA, 74 bp, Artificial Sequence
  Description of Artificial Sequence: Synthetic oligonucleotide
gaaattaatacgactcactatagggatgaataatacgtcccatgggatctcagttttagagctatgctgttttg

SEQ ID NO: 1165 - DNA, 74 bp, Artificial Sequence
  Description of Artificial Sequence: Synthetic oligonucleotide
gaaattaatacgactcactatagggatgaataactataagctccttagaggcgttttagagctatgctgttttg

SEQ ID NO: 1166 - DNA, 74 bp, Artificial Sequence
  Description of Artificial Sequence: Synthetic oligonucleotide
gaaattaatacgactcactatagggatgaataaaaacgttaaaaagaactgggttttagagctatgctgttttg

SEQ ID NO: 1167 - DNA, 74 bp, Artificial Sequence
  Description of Artificial Sequence: Synthetic oligonucleotide
gaaattaatacgactcactatagggatgaatagggaaatatttttataacaggttttagagctatgctgttttg

SEQ ID NO: 1168 - DNA, 74 bp, Artificial Sequence
  Description of Artificial Sequence: Synthetic oligonucleotide
gaaattaatacgactcactatagggatgaatatcttttaatggattacaggagttttagagctatgctgttttg

SEQ ID NO: 1169 - DNA, 74 bp, Artificial Sequence
  Description of Artificial Sequence: Synthetic oligonucleotide
gaaattaatacgactcactatagggatgaatataaccctgtcagaaaccaaggttttagagctatgctgttttg

SEQ ID NO: 1170 - DNA, 74 bp, Artificial Sequence
  Description of Artificial Sequence: Synthetic oligonucleotide
gaaattaatacgactcactatagggatgaatacttgcattgctataacccaggttttagagctatgctgttttg

SEQ ID NO: 1171 - DNA, 74 bp, Artificial Sequence
  Description of Artificial Sequence: Synthetic oligonucleotide
gaaattaatacgactcactatagggatgaataataattttaaaaaattagccgttttagagctatgctgttttg

SEQ ID NO: 1172 - DNA, 74 bp, Artificial Sequence
  Description of Artificial Sequence: Synthetic oligonucleotide
gaaattaatacgactcactatagggatgaatatgtttgtagactgggcatgggttttagagctatgctgttttg

SEQ ID NO: 1173 - DNA, 74 bp, Artificial Sequence
  Description of Artificial Sequence: Synthetic oligonucleotide
gaaattaatacgactcactatagggatgaatataatctttaaaaatggctacgttttagagctatgctgttttg

SEQ ID NO: 1174 - DNA, 74 bp, Artificial Sequence
  Description of Artificial Sequence: Synthetic oligonucleotide
gaaattaatacgactcactatagggatgaataccttccaaagtgttaaacacgttttagagctatgctgttttg

SEQ ID NO: 1175 - DNA, 74 bp, Artificial Sequence
  Description of Artificial Sequence: Synthetic oligonucleotide
gaaattaatacgactcactatagggatgaatagagccgaaaatacaggatgcgttttagagctatgctgttttg

SEQ ID NO: 1176 - DNA, 74 bp, Artificial Sequence
  Description of Artificial Sequence: Synthetic oligonucleotide
gaaattaatacgactcactatagggatgaatatttctttactcctgatatgggttttagagctatgctgttttg

SEQ ID NO: 1177 - DNA, 74 bp, Artificial Sequence
  Description of Artificial Sequence: Synthetic oligonucleotide
gaaattaatacgactcactatagggatgaatagagggggaagagagaagtaggttttagagctatgctgttttg

SEQ ID NO: 1178 - DNA, 74 bp, Artificial Sequence
  Description of Artificial Sequence: Synthetic oligonucleotide
gaaattaatacgactcactatagggatgaatacaatttcaaagcttctgagcgttttagagctatgctgttttg

SEQ ID NO: 1179 - DNA, 74 bp, Artificial Sequence
  Description of Artificial Sequence: Synthetic oligonucleotide
gaaattaatacgactcactatagggatgaatagatgagactgaataaagtgagttttagagctatgctgttttg

SEQ ID NO: 1180 - DNA, 74 bp, Artificial Sequence
  Description of Artificial Sequence: Synthetic oligonucleotide
gaaattaatacgactcactatagggatgaataaagcgtaataaggagactgagttttagagctatgctgttttg

SEQ ID NO: 1181 - DNA, 74 bp, Artificial Sequence
  Description of Artificial Sequence: Synthetic oligonucleotide
gaaattaatacgactcactatagggatgaataagataagctgagaaggccaggttttagagctatgctgttttg

SEQ ID NO: 1182 - DNA, 74 bp, Artificial Sequence
  Description of Artificial Sequence: Synthetic oligonucleotide
gaaattaatacgactcactatagggatgaataaggcatgctgagaatactgggttttagagctatgctgttttg

SEQ ID NO: 1183 - DNA, 74 bp, Artificial Sequence
  Description of Artificial Sequence: Synthetic oligonucleotide
gaaattaatacgactcactatagggatgaatacctgaagctctatgttacaggttttagagctatgctgttttg

SEQ ID NO: 1184 - DNA, 74 bp, Artificial Sequence
  Description of Artificial Sequence: Synthetic oligonucleotide
gaaattaatacgactcactatagggatgaataatggaagctccaatctggacgttttagagctatgctgttttg

SEQ ID NO: 1185 - DNA, 74 bp, Artificial Sequence
  Description of Artificial Sequence: Synthetic oligonucleotide
gaaattaatacgactcactatagggatgaataattattttagttgtgagagcgttttagagctatgctgttttg

SEQ ID NO: 1186 - DNA, 74 bp, Artificial Sequence
  Description of Artificial Sequence: Synthetic oligonucleotide
gaaattaatacgactcactatagggatgaataaatcctgttggaaagactgagttttagagctatgctgttttg

SEQ ID NO: 1187 - DNA, 74 bp, Artificial Sequence
  Description of Artificial Sequence: Synthetic oligonucleotide
gaaattaatacgactcactatagggatgaataaataaaaagggagtttctgggttttagagctatgctgttttg

SEQ ID NO: 1188 - DNA, 74 bp, Artificial Sequence
  Description of Artificial Sequence: Synthetic oligonucleotide
gaaattaatacgactcactatagggatgaatagtgcaccaggagacgtatacgttttagagctatgctgttttg

SEQ ID NO: 1189 - DNA, 74 bp, Artificial Sequence
  Description of Artificial Sequence: Synthetic oligonucleotide
gaaattaatacgactcactatagggatgaatatagaacaatattaaggatcggttttagagctatgctgttttg

SEQ ID NO: 1190 - DNA, 74 bp, Artificial Sequence
  Description of Artificial Sequence: Synthetic oligonucleotide
gaaattaatacgactcactatagggatgaatatgagaagctgctttccatcagttttagagctatgctgttttg

SEQ ID NO: 1191 - DNA, 74 bp, Artificial Sequence
  Description of Artificial Sequence: Synthetic oligonucleotide
gaaattaatacgactcactatagggatgaataaagaagatcaataaagaggagttttagagctatgctgttttg

SEQ ID NO: 1192 - DNA, 74 bp, Artificial Sequence
  Description of Artificial Sequence: Synthetic oligonucleotide
gaaattaatacgactcactatagggatgaataacagagaggtacactgctaagttttagagctatgctgttttg

SEQ ID NO: 1193 - DNA, 74 bp, Artificial Sequence
  Description of Artificial Sequence: Synthetic oligonucleotide
gaaattaatacgactcactatagggatgaatagtgcaggaataacagcaaacgttttagagctatgctgttttg

SEQ ID NO: 1194 - DNA, 74 bp, Artificial Sequence
  Description of Artificial Sequence: Synthetic oligonucleotide
gaaattaatacgactcactatagggatgaataggaggctcatttgggaaaaagttttagagctatgctgttttg

SEQ ID NO: 1195 - DNA, 74 bp, Artificial Sequence
  Description of Artificial Sequence: Synthetic oligonucleotide
gaaattaatacgactcactatagggatgaataggatggagcactattggccagttttagagctatgctgttttg

SEQ ID NO: 1196 - DNA, 74 bp, Artificial Sequence
  Description of Artificial Sequence: Synthetic oligonucleotide
gaaattaatacgactcactatagggatgaatattaaaatttatattaaggaagttttagagctatgctgttttg

SEQ ID NO: 1197 - DNA, 74 bp, Artificial Sequence
  Description of Artificial Sequence: Synthetic oligonucleotide
gaaattaatacgactcactatagggatgaataagtgaaatgtggctctgaccgttttagagctatgctgttttg

SEQ ID NO: 1198 - DNA, 74 bp, Artificial Sequence
  Description of Artificial Sequence: Synthetic oligonucleotide
gaaattaatacgactcactatagggatgaatattttctcacagtgaaagtaggttttagagctatgctgttttg

SEQ ID NO: 1199 - DNA, 74 bp, Artificial Sequence
  Description of Artificial Sequence: Synthetic oligonucleotide
gaaattaatacgactcactatagggatgaatatgagcaagagggaaaggtaggttttagagctatgctgttttg

SEQ ID NO: 1200 - DNA, 74 bp, Artificial Sequence
  Description of Artificial Sequence: Synthetic oligonucleotide
gaaattaatacgactcactatagggatgaataacatttgactatgtgggacggttttagagctatgctgttttg

SEQ ID NO: 1201 - DNA, 74 bp, Artificial Sequence
  Description of Artificial Sequence: Synthetic oligonucleotide
gaaattaatacgactcactatagggatgaatatatttagaacactgtgctaggttttagagctatgctgttttg

SEQ ID NO: 1202 - DNA, 74 bp, Artificial Sequence
  Description of Artificial Sequence: Synthetic oligonucleotide
gaaattaatacgactcactatagggatgaataactttgaaatagtgtcaagagttttagagctatgctgttttg

SEQ ID NO: 1203 - DNA, 74 bp, Artificial Sequence
  Description of Artificial Sequence: Synthetic oligonucleotide
gaaattaatacgactcactatagggatgaatactttggagtcagacagaccagttttagagctatgctgttttg

SEQ ID NO: 1204 - DNA, 74 bp, Artificial Sequence
  Description of Artificial Sequence: Synthetic oligonucleotide
gaaattaatacgactcactatagggatgaataaaaatatgcttcaatccaacgttttagagctatgctgttttg

SEQ ID NO: 1205 - DNA, 74 bp, Artificial Sequence
  Description of Artificial Sequence: Synthetic oligonucleotide
gaaattaatacgactcactatagggatgaatacagcaccagcccaggtgcaggttttagagctatgctgttttg

SEQ ID NO: 1206 - DNA, 74 bp, Artificial Sequence
  Description of Artificial Sequence: Synthetic oligonucleotide
gaaattaatacgactcactatagggatgaataaagaaagaggttgtttatccgttttagagctatgctgttttg

SEQ ID NO: 1207 - DNA, 74 bp, Artificial Sequence
  Description of Artificial Sequence: Synthetic oligonucleotide
gaaattaatacgactcactatagggatgaatatcaggtcacaaaggaagaaggttttagagctatgctgttttg

SEQ ID NO: 1208 - DNA, 74 bp, Artificial Sequence
  Description of Artificial Sequence: Synthetic oligonucleotide
gaaattaatacgactcactatagggatgaatagtacacagtcttggctctcagttttagagctatgctgttttg

SEQ ID NO: 1209 - DNA, 74 bp, Artificial Sequence
  Description of Artificial Sequence: Synthetic oligonucleotide
gaaattaatacgactcactatagggatgaataaattcattcgttcactccaagttttagagctatgctgttttg

SEQ ID NO: 1210 - DNA, 74 bp, Artificial Sequence
  Description of Artificial Sequence: Synthetic oligonucleotide
gaaattaatacgactcactatagggatgaataattactttatgacagtaagcgttttagagctatgctgttttg

SEQ ID NO: 1211 - DNA, 74 bp, Artificial Sequence
  Description of Artificial Sequence: Synthetic oligonucleotide
gaaattaatacgactcactatagggatgaatataggctgatggtgttggaaagttttagagctatgctgttttg

SEQ ID NO: 1212 - DNA, 74 bp, Artificial Sequence
  Description of Artificial Sequence: Synthetic oligonucleotide
gaaattaatacgactcactatagggatgaatagggaagttattaagaccaacgttttagagctatgctgttttg

SEQ ID NO: 1213 - DNA, 74 bp, Artificial Sequence
  Description of Artificial Sequence: Synthetic oligonucleotide
gaaattaatacgactcactatagggatgaataaggtttgtgttctgttatcagttttagagctatgctgttttg

SEQ ID NO: 1214 - DNA, 74 bp, Artificial Sequence
  Description of Artificial Sequence: Synthetic oligonucleotide
gaaattaatacgactcactatagggatgaatatcaaactcagttaatggagggttttagagctatgctgttttg

SEQ ID NO: 1215 - DNA, 74 bp, Artificial Sequence
  Description of Artificial Sequence: Synthetic oligonucleotide
gaaattaatacgactcactatagggatgaataattacacagtcgtaacaagagttttagagctatgctgttttg

SEQ ID NO: 1216 - DNA, 74 bp, Artificial Sequence
  Description of Artificial Sequence: Synthetic oligonucleotide
gaaattaatacgactcactatagggatgaataattttgcaacaaataaaaaagttttagagctatgctgttttg

SEQ ID NO: 1217 - DNA, 74 bp, Artificial Sequence
  Description of Artificial Sequence: Synthetic oligonucleotide
gaaattaatacgactcactatagggatgaataaatcactgagagtggccagggttttagagctatgctgttttg

SEQ ID NO: 1218 - DNA, 74 bp, Artificial Sequence
  Description of Artificial Sequence: Synthetic oligonucleotide
gaaattaatacgactcactatagggatgaataattcctacagaactctctgagttttagagctatgctgttttg

SEQ ID NO: 1219 - DNA, 74 bp, Artificial Sequence
  Description of Artificial Sequence: Synthetic oligonucleotide
gaaattaatacgactcactatagggatgaatatcacaaaaaacgttgtgtaggttttagagctatgctgttttg

SEQ ID NO: 1220 - DNA, 74 bp, Artificial Sequence
  Description of Artificial Sequence: Synthetic oligonucleotide
gaaattaatacgactcactatagggatgaatagaaggagagtccggacgcgggttttagagctatgctgttttg

SEQ ID NO: 1221 - DNA, 74 bp, Artificial Sequence
  Description of Artificial Sequence: Synthetic oligonucleotide
gaaattaatacgactcactatagggatgaatatgtggtaggtggttctgtaagttttagagctatgctgttttg

SEQ ID NO: 1222 - DNA, 74 bp, Artificial Sequence
  Description of Artificial Sequence: Synthetic oligonucleotide
gaaattaatacgactcactatagggatgaataagaacaataacactaccaccgttttagagctatgctgttttg

SEQ ID NO: 1223 - DNA, 74 bp, Artificial Sequence
  Description of Artificial Sequence: Synthetic oligonucleotide
gaaattaatacgactcactatagggatgaatagaggaggaaactggatgggcgttttagagctatgctgttttg

SEQ ID NO: 1224 - DNA, 74 bp, Artificial Sequence
  Description of Artificial Sequence: Synthetic oligonucleotide
gaaattaatacgactcactatagggatgaatacaggatcaacatgattagccgttttagagctatgctgttttg

SEQ ID NO: 1225 - DNA, 74 bp, Artificial Sequence
  Description of Artificial Sequence: Synthetic oligonucleotide
gaaattaatacgactcactatagggatgaatatattgcacagttacatctcagttttagagctatgctgttttg

SEQ ID NO: 1226 - DNA, 74 bp, Artificial Sequence
  Description of Artificial Sequence: Synthetic oligonucleotide
gaaattaatacgactcactatagggatgaataagtccagaacatgttacaacgttttagagctatgctgttttg

SEQ ID NO: 1227 - DNA, 74 bp, Artificial Sequence
  Description of Artificial Sequence: Synthetic oligonucleotide
gaaattaatacgactcactatagggatgaatacatcactagataaaccaagcgttttagagctatgctgttttg

SEQ ID NO: 1228 - DNA, 74 bp, Artificial Sequence
  Description of Artificial Sequence: Synthetic oligonucleotide
gaaattaatacgactcactatagggatgaataagagacattggagcagctgggttttagagctatgctgttttg

SEQ ID NO: 1229 - DNA, 74 bp, Artificial Sequence
  Description of Artificial Sequence: Synthetic oligonucleotide
gaaattaatacgactcactatagggatgaatacctgggcaaacacagagcacgttttagagctatgctgttttg

SEQ ID NO: 1230 - DNA, 74 bp, Artificial Sequence
  Description of Artificial Sequence: Synthetic oligonucleotide
gaaattaatacgactcactatagggatgaataaggaagacatcgaggtggaagttttagagctatgctgttttg

SEQ ID NO: 1231 - DNA, 74 bp, Artificial Sequence
  Description of Artificial Sequence: Synthetic oligonucleotide
gaaattaatacgactcactatagggatgaatacagccacagggtactagaaggttttagagctatgctgttttg

SEQ ID NO: 1232 - DNA, 74 bp, Artificial Sequence
  Description of Artificial Sequence: Synthetic oligonucleotide
gaaattaatacgactcactatagggatgaatagctgggtgcaactgccacaagttttagagctatgctgttttg

SEQ ID NO: 1233 - DNA, 74 bp, Artificial Sequence
  Description of Artificial Sequence: Synthetic oligonucleotide
gaaattaatacgactcactatagggatgaataaggaattttgtcacagcaaggttttagagctatgctgttttg

SEQ ID NO: 1234 - DNA, 74 bp, Artificial Sequence
  Description of Artificial Sequence: Synthetic oligonucleotide
gaaattaatacgactcactatagggatgaatataagtgcctctcctttcccagttttagagctatgctgttttg

SEQ ID NO: 1235 - DNA, 74 bp, Artificial Sequence
  Description of Artificial Sequence: Synthetic oligonucleotide
gaaattaatacgactcactatagggatgaatacagacaataccagatgagccgttttagagctatgctgttttg

SEQ ID NO: 1236 - DNA, 74 bp, Artificial Sequence
  Description of Artificial Sequence: Synthetic oligonucleotide
gaaattaatacgactcactatagggatgaatactttgagagcctcgcgctaggttttagagctatgctgttttg

SEQ ID NO: 1237 - DNA, 74 bp, Artificial Sequence
  Description of Artificial Sequence: Synthetic oligonucleotide
gaaattaatacgactcactatagggatgaataaagggtagtggcacttatgagttttagagctatgctgttttg

SEQ ID NO: 1238 - DNA, 74 bp, Artificial Sequence
  Description of Artificial Sequence: Synthetic oligonucleotide
gaaattaatacgactcactatagggatgaatacagccagctttccagaaggcgttttagagctatgctgttttg

SEQ ID NO: 1239 - DNA, 74 bp, Artificial Sequence
  Description of Artificial Sequence: Synthetic oligonucleotide
gaaattaatacgactcactatagggatgaatatttaccttaccctgttcaacgttttagagctatgctgttttg

SEQ ID NO: 1240 - DNA, 74 bp, Artificial Sequence
  Description of Artificial Sequence: Synthetic oligonucleotide
gaaattaatacgactcactatagggatgaatacatcagatttcccagtggaagttttagagctatgctgttttg

SEQ ID NO: 1241 - DNA, 74 bp, Artificial Sequence
  Description of Artificial Sequence: Synthetic oligonucleotide
gaaattaatacgactcactatagggatgaatacagagttttatgttgggtacgttttagagctatgctgttttg

SEQ ID NO: 1242 - DNA, 74 bp, Artificial Sequence
  Description of Artificial Sequence: Synthetic oligonucleotide
gaaattaatacgactcactatagggatgaataaatttgaggggatgtcacaagttttagagctatgctgttttg

SEQ ID NO: 1243 - DNA, 74 bp, Artificial Sequence
  Description of Artificial Sequence: Synthetic oligonucleotide
gaaattaatacgactcactatagggatgaatagtggagccatgaaatgaggcgttttagagctatgctgttttg

SEQ ID NO: 1244 - DNA, 74 bp, Artificial Sequence
  Description of Artificial Sequence: Synthetic oligonucleotide
gaaattaatacgactcactatagggatgaatatcttggcatatctgttgcaagttttagagctatgctgttttg

SEQ ID NO: 1245 - DNA, 74 bp, Artificial Sequence
  Description of Artificial Sequence: Synthetic oligonucleotide
gaaattaatacgactcactatagggatgaataatgattaaatagtatggacagttttagagctatgctgttttg

SEQ ID NO: 1246 - DNA, 74 bp, Artificial Sequence
  Description of Artificial Sequence: Synthetic oligonucleotide
gaaattaatacgactcactatagggatgaataaaaaaacaggctgggcacaggttttagagctatgctgttttg

SEQ ID NO: 1247 - DNA, 74 bp, Artificial Sequence
  Description of Artificial Sequence: Synthetic oligonucleotide
gaaattaatacgactcactatagggatgaataaggaaaggggccatgaatcagttttagagctatgctgttttg

SEQ ID NO: 1248 - DNA, 74 bp, Artificial Sequence
  Description of Artificial Sequence: Synthetic oligonucleotide
gaaattaatacgactcactatagggatgaatatatatttgaggaaataatgagttttagagctatgctgttttg

SEQ ID NO: 1249 - DNA, 74 bp, Artificial Sequence
  Description of Artificial Sequence: Synthetic oligonucleotide
gaaattaatacgactcactatagggatgaatagcactcaaataatttgctcagttttagagctatgctgttttg

SEQ ID NO: 1250 - DNA, 74 bp, Artificial Sequence
  Description of Artificial Sequence: Synthetic oligonucleotide
gaaattaatacgactcactatagggatgaataagaatcattttccaagcagagttttagagctatgctgttttg

SEQ ID NO: 1251 - DNA, 74 bp, Artificial Sequence
  Description of Artificial Sequence: Synthetic oligonucleotide
gaaattaatacgactcactatagggatgaatacaaagatagagaataaatgcgttttagagctatgctgttttg

SEQ ID NO: 1252 - DNA, 74 bp, Artificial Sequence
  Description of Artificial Sequence: Synthetic oligonucleotide
gaaattaatacgactcactatagggatgaataaatacaacaaaaaaaacacagttttagagctatgctgttttg

SEQ ID NO: 1253 - DNA, 74 bp, Artificial Sequence
  Description of Artificial Sequence: Synthetic oligonucleotide
gaaattaatacgactcactatagggatgaataggaaaatatctgaaacaggagttttagagctatgctgttttg

SEQ ID NO: 1254 - DNA, 74 bp, Artificial Sequence
  Description of Artificial Sequence: Synthetic oligonucleotide
gaaattaatacgactcactatagggatgaatactgggggctgcactgcatgcgttttagagctatgctgttttg

SEQ ID NO: 1255 - DNA, 74 bp, Artificial Sequence
  Description of Artificial Sequence: Synthetic oligonucleotide
gaaattaatacgactcactatagggatgaataactttgctgaagcactctgcgttttagagctatgctgttttg

SEQ ID NO: 1256 - DNA, 74 bp, Artificial Sequence
  Description of Artificial Sequence: Synthetic oligonucleotide
gaaattaatacgactcactatagggatgaatactgtgatgtgggggtgggcagttttagagctatgctgttttg

SEQ ID NO: 1257 - DNA, 74 bp, Artificial Sequence
  Description of Artificial Sequence: Synthetic oligonucleotide
gaaattaatacgactcactatagggatgaatagcagcatctgtggcgtcaacgttttagagctatgctgttttg

SEQ ID NO: 1258 - DNA, 74 bp, Artificial Sequence
  Description of Artificial Sequence: Synthetic oligonucleotide
gaaattaatacgactcactatagggatgaatagggggatcagggatgtaagggttttagagctatgctgttttg

SEQ ID NO: 1259 - DNA, 74 bp, Artificial Sequence
  Description of Artificial Sequence: Synthetic oligonucleotide
gaaattaatacgactcactatagggatgaataattttctaaattgaaaaaccgttttagagctatgctgttttg

SEQ ID NO: 1260 - DNA, 74 bp, Artificial Sequence
  Description of Artificial Sequence: Synthetic oligonucleotide
gaaattaatacgactcactatagggatgaatacaggctgccctttaaaataagttttagagctatgctgttttg

SEQ ID NO: 1261 - DNA, 74 bp, Artificial Sequence
  Description of Artificial Sequence: Synthetic oligonucleotide
gaaattaatacgactcactatagggatgaatatcagcagacaacccacagaagttttagagctatgctgttttg

SEQ ID NO: 1262 - DNA, 74 bp, Artificial Sequence
  Description of Artificial Sequence: Synthetic oligonucleotide
gaaattaatacgactcactatagggatgaatagaaatgaagggcattgagaggttttagagctatgctgttttg

SEQ ID NO: 1263 - DNA, 74 bp, Artificial Sequence
  Description of Artificial Sequence: Synthetic oligonucleotide
gaaattaatacgactcactatagggatgaatatcatcctgataaccaaaaccgttttagagctatgctgttttg

SEQ ID NO: 1264 - DNA, 74 bp, Artificial Sequence
  Description of Artificial Sequence: Synthetic oligonucleotide
gaaattaatacgactcactatagggatgaatagctgtgaatctgtctagtccgttttagagctatgctgttttg

SEQ ID NO: 1265 - DNA, 74 bp, Artificial Sequence
  Description of Artificial Sequence: Synthetic oligonucleotide
gaaattaatacgactcactatagggatgaataatgtgttccacctattatgggttttagagctatgctgttttg

SEQ ID NO: 1266 - DNA, 74 bp, Artificial Sequence
  Description of Artificial Sequence: Synthetic oligonucleotide
gaaattaatacgactcactatagggatgaatactggagtctaagacttggcagttttagagctatgctgttttg

SEQ ID NO: 1267 - DNA, 74 bp, Artificial Sequence
  Description of Artificial Sequence: Synthetic oligonucleotide
gaaattaatacgactcactatagggatgaataaaggatggggaaggaggcccgttttagagctatgctgttttg

SEQ ID NO: 1268 - DNA, 74 bp, Artificial Sequence
  Description of Artificial Sequence: Synthetic oligonucleotide
gaaattaatacgactcactatagggatgaataagtatgttaatttgacaagggttttagagctatgctgttttg

SEQ ID NO: 1269 - DNA, 74 bp, Artificial Sequence
  Description of Artificial Sequence: Synthetic oligonucleotide
gaaattaatacgactcactatagggatgaatatctaaaaacaatcattagacgttttagagctatgctgttttg

SEQ ID NO: 1270 - DNA, 74 bp, Artificial Sequence
  Description of Artificial Sequence: Synthetic oligonucleotide
gaaattaatacgactcactatagggatgaatatctaggaaaatctactgaaggttttagagctatgctgttttg

SEQ ID NO: 1271 - DNA, 74 bp, Artificial Sequence
  Description of Artificial Sequence: Synthetic oligonucleotide
gaaattaatacgactcactatagggatgaataacaaaatattttggagatgagttttagagctatgctgttttg

SEQ ID NO: 1272 - DNA, 74 bp, Artificial Sequence
  Description of Artificial Sequence: Synthetic oligonucleotide
gaaattaatacgactcactatagggatgaatactattttttttaaacaaaaggttttagagctatgctgttttg

SEQ ID NO: 1273 - DNA, 74 bp, Artificial Sequence
  Description of Artificial Sequence: Synthetic oligonucleotide
gaaattaatacgactcactatagggatgaataggattgataagtatgcgggcgttttagagctatgctgttttg

SEQ ID NO: 1274 - DNA, 74 bp, Artificial Sequence
  Description of Artificial Sequence: Synthetic oligonucleotide
gaaattaatacgactcactatagggatgaatataaagagctcaattgtataagttttagagctatgctgttttg

SEQ ID NO: 1275 - DNA, 74 bp, Artificial Sequence
  Description of Artificial Sequence: Synthetic oligonucleotide
gaaattaatacgactcactatagggatgaatatctggtgacgtggagactcagttttagagctatgctgttttg

SEQ ID NO: 1276 - DNA, 74 bp, Artificial Sequence
  Description of Artificial Sequence: Synthetic oligonucleotide
gaaattaatacgactcactatagggatgaataccagaagctttcatgggtccgttttagagctatgctgttttg

SEQ ID NO: 1277 - DNA, 74 bp, Artificial Sequence
  Description of Artificial Sequence: Synthetic oligonucleotide
gaaattaatacgactcactatagggatgaatagtgcacagtgcccaaacaaggttttagagctatgctgttttg

SEQ ID NO: 1278 - DNA, 74 bp, Artificial Sequence
  Description of Artificial Sequence: Synthetic oligonucleotide
gaaattaatacgactcactatagggatgaataaaagcttccttctccacgccgttttagagctatgctgttttg

SEQ ID NO: 1279 - DNA, 74 bp, Artificial Sequence
  Description of Artificial Sequence: Synthetic oligonucleotide
gaaattaatacgactcactatagggatgaatacctgtggctcaccactaaaagttttagagctatgctgttttg

SEQ ID NO: 1280 - DNA, 74 bp, Artificial Sequence
  Description of Artificial Sequence: Synthetic oligonucleotide
gaaattaatacgactcactatagggatgaatagctccataccctcagcaggcgttttagagctatgctgttttg

SEQ ID NO: 1281 - DNA, 74 bp, Artificial Sequence
  Description of Artificial Sequence: Synthetic oligonucleotide
gaaattaatacgactcactatagggatgaataccagagcaagagtacaaagcgttttagagctatgctgttttg

SEQ ID NO: 1282 - DNA, 74 bp, Artificial Sequence
  Description of Artificial Sequence: Synthetic oligonucleotide
gaaattaatacgactcactatagggatgaatataacacttacagataacagcgttttagagctatgctgttttg

SEQ ID NO: 1283 - DNA, 74 bp, Artificial Sequence
  Description of Artificial Sequence: Synthetic oligonucleotide
gaaattaatacgactcactatagggatgaatactgcaaggccaggatagtgagttttagagctatgctgttttg

SEQ ID NO: 1284 - DNA, 74 bp, Artificial Sequence
  Description of Artificial Sequence: Synthetic oligonucleotide
gaaattaatacgactcactatagggatgaatatgatcgggagaaataaatacgttttagagctatgctgttttg

SEQ ID NO: 1285 - DNA, 74 bp, Artificial Sequence
  Description of Artificial Sequence: Synthetic oligonucleotide
gaaattaatacgactcactatagggatgaataattggtcagaactttgatgagttttagagctatgctgttttg

SEQ ID NO: 1286 - DNA, 74 bp, Artificial Sequence
  Description of Artificial Sequence: Synthetic oligonucleotide
gaaattaatacgactcactatagggatgaatatggagaatggagagatctaggttttagagctatgctgttttg

SEQ ID NO: 1287 - DNA, 74 bp, Artificial Sequence
  Description of Artificial Sequence: Synthetic oligonucleotide
gaaattaatacgactcactatagggatgaatatgatagacacacagagctcagttttagagctatgctgttttg

SEQ ID NO: 1288 - DNA, 74 bp, Artificial Sequence
  Description of Artificial Sequence: Synthetic oligonucleotide
gaaattaatacgactcactatagggatgaatataatttgttgagttgaccccgttttagagctatgctgttttg

SEQ ID NO: 1289 - DNA, 74 bp, Artificial Sequence
  Description of Artificial Sequence: Synthetic oligonucleotide
gaaattaatacgactcactatagggatgaatagagcatgaggtgagtaaaccgttttagagctatgctgttttg

SEQ ID NO: 1290 - DNA, 74 bp, Artificial Sequence
  Description of Artificial Sequence: Synthetic oligonucleotide
gaaattaatacgactcactatagggatgaatacctttcctagagttatgtacgttttagagctatgctgttttg

SEQ ID NO: 1291 - DNA, 74 bp, Artificial Sequence
  Description of Artificial Sequence: Synthetic oligonucleotide
gaaattaatacgactcactatagggatgaatactggagagcactggtggggggttttagagctatgctgttttg

SEQ ID NO: 1292 - DNA, 74 bp, Artificial Sequence
  Description of Artificial Sequence: Synthetic oligonucleotide
gaaattaatacgactcactatagggatgaataattcacccaaatagcaaagagttttagagctatgctgttttg

SEQ ID NO: 1293 - DNA, 74 bp, Artificial Sequence
  Description of Artificial Sequence: Synthetic oligonucleotide
gaaattaatacgactcactatagggatgaataagtgaggaggaatgagatgggttttagagctatgctgttttg

SEQ ID NO: 1294 - DNA, 74 bp, Artificial Sequence
  Description of Artificial Sequence: Synthetic oligonucleotide
gaaattaatacgactcactatagggatgaatacctctgagagcttcatcccagttttagagctatgctgttttg

SEQ ID NO: 1295 - DNA, 74 bp, Artificial Sequence
  Description of Artificial Sequence: Synthetic oligonucleotide
gaaattaatacgactcactatagggatgaataaggctttcagttgcccctgggttttagagctatgctgttttg

SEQ ID NO: 1296 - DNA, 74 bp, Artificial Sequence
  Description of Artificial Sequence: Synthetic oligonucleotide
gaaattaatacgactcactatagggatgaatagcaatctgtacaatcagcccgttttagagctatgctgttttg

SEQ ID NO: 1297 - DNA, 74 bp, Artificial Sequence
  Description of Artificial Sequence: Synthetic oligonucleotide
gaaattaatacgactcactatagggatgaatactgccaggggctaggggcaggttttagagctatgctgttttg

SEQ ID NO: 1298 - DNA, 74 bp, Artificial Sequence
  Description of Artificial Sequence: Synthetic oligonucleotide
gaaattaatacgactcactatagggatgaatactgagaactgattagactcagttttagagctatgctgttttg

SEQ ID NO: 1299 - DNA, 74 bp, Artificial Sequence
  Description of Artificial Sequence: Synthetic oligonucleotide
gaaattaatacgactcactatagggatgaataattcccgcccactgtgctccgttttagagctatgctgttttg

SEQ ID NO: 1300 - DNA, 74 bp, Artificial Sequence
  Description of Artificial Sequence: Synthetic oligonucleotide
gaaattaatacgactcactatagggatgaatacagctaggcttttgtggagcgttttagagctatgctgttttg

SEQ ID NO: 1301 - DNA, 74 bp, Artificial Sequence
  Description of Artificial Sequence: Synthetic oligonucleotide
gaaattaatacgactcactatagggatgaataagaataacaaccaggaaaacgttttagagctatgctgttttg

SEQ ID NO: 1302 - DNA, 74 bp, Artificial Sequence
  Description of Artificial Sequence: Synthetic oligonucleotide
gaaattaatacgactcactatagggatgaatatatggacattcacaggcaaggttttagagctatgctgttttg

SEQ ID NO: 1303 - DNA, 74 bp, Artificial Sequence
  Description of Artificial Sequence: Synthetic oligonucleotide
gaaattaatacgactcactatagggatgaatatgaactaggatctcaaacccgttttagagctatgctgttttg

SEQ ID NO: 1304 - DNA, 74 bp, Artificial Sequence
  Description of Artificial Sequence: Synthetic oligonucleotide
gaaattaatacgactcactatagggatgaatagagaaaaagggacaccagaggttttagagctatgctgttttg

SEQ ID NO: 1305 - DNA, 74 bp, Artificial Sequence
  Description of Artificial Sequence: Synthetic oligonucleotide
gaaattaatacgactcactatagggatgaatagaattagccaaaggccaagcgttttagagctatgctgttttg

SEQ ID NO: 1306 - DNA, 74 bp, Artificial Sequence
  Description of Artificial Sequence: Synthetic oligonucleotide
gaaattaatacgactcactatagggatgaatacaaaatgcattgttcaatacgttttagagctatgctgttttg

SEQ ID NO: 1307 - DNA, 74 bp, Artificial Sequence
  Description of Artificial Sequence: Synthetic oligonucleotide
gaaattaatacgactcactatagggatgaatatggcactcaggcctgtgcacgttttagagctatgctgttttg

SEQ ID NO: 1308 - DNA, 74 bp, Artificial Sequence
  Description of Artificial Sequence: Synthetic oligonucleotide
gaaattaatacgactcactatagggatgaatacctgccaggctctggaacccgttttagagctatgctgttttg

SEQ ID NO: 1309 - DNA, 74 bp, Artificial Sequence
  Description of Artificial Sequence: Synthetic oligonucleotide
gaaattaatacgactcactatagggatgaatagagtattataaccaccacccgttttagagctatgctgttttg

SEQ ID NO: 1310 - DNA, 74 bp, Artificial Sequence
  Description of Artificial Sequence: Synthetic oligonucleotide
gaaattaatacgactcactatagggatgaatagggccttctctatgttctcagttttagagctatgctgttttg

SEQ ID NO: 1311 - DNA, 74 bp, Artificial Sequence
  Description of Artificial Sequence: Synthetic oligonucleotide
gaaattaatacgactcactatagggatgaataataccacaggaggaggaggagttttagagctatgctgttttg

SEQ ID NO: 1312 - DNA, 74 bp, Artificial Sequence
  Description of Artificial Sequence: Synthetic oligonucleotide
gaaattaatacgactcactatagggatgaatagaatacaagcatgaagagaagttttagagctatgctgttttg

SEQ ID NO: 1313 - DNA, 74 bp, Artificial Sequence
  Description of Artificial Sequence: Synthetic oligonucleotide
gaaattaatacgactcactatagggatgaatagttaggtcattccctagagcgttttagagctatgctgttttg

SEQ ID NO: 1314 - DNA, 74 bp, Artificial Sequence
  Description of Artificial Sequence: Synthetic oligonucleotide
gaaattaatacgactcactatagggatgaatataacctgcagcagagagacagttttagagctatgctgttttg

SEQ ID NO: 1315 - DNA, 74 bp, Artificial Sequence
  Description of Artificial Sequence: Synthetic oligonucleotide
gaaattaatacgactcactatagggatgaataacgcacctggtgagcagagagttttagagctatgctgttttg

SEQ ID NO: 1316 - DNA, 74 bp, Artificial Sequence
  Description of Artificial Sequence: Synthetic oligonucleotide
gaaattaatacgactcactatagggatgaatagggaaggagaagggcagggggttttagagctatgctgttttg

SEQ ID NO: 1317 - DNA, 74 bp, Artificial Sequence
  Description of Artificial Sequence: Synthetic oligonucleotide
gaaattaatacgactcactatagggatgaataccagtccaggcccttggaaggttttagagctatgctgttttg

SEQ ID NO: 1318 - DNA, 74 bp, Artificial Sequence
  Description of Artificial Sequence: Synthetic oligonucleotide
gaaattaatacgactcactatagggatgaatacagcctcatccatgggaggggttttagagctatgctgttttg

SEQ ID NO: 1319 - DNA, 74 bp, Artificial Sequence
  Description of Artificial Sequence: Synthetic oligonucleotide
gaaattaatacgactcactatagggatgaatattggagtggtgaacatgggcgttttagagctatgctgttttg

SEQ ID NO: 1320 - DNA, 74 bp, Artificial Sequence
  Description of Artificial Sequence: Synthetic oligonucleotide
gaaattaatacgactcactatagggatgaatagtaaggttttgaaagtcagagttttagagctatgctgttttg

SEQ ID NO: 1321 - DNA, 74 bp, Artificial Sequence
  Description of Artificial Sequence: Synthetic oligonucleotide
gaaattaatacgactcactatagggatgaatagtgggtggacatgggggtgagttttagagctatgctgttttg

SEQ ID NO: 1322 - DNA, 74 bp, Artificial Sequence
  Description of Artificial Sequence: Synthetic oligonucleotide
gaaattaatacgactcactatagggatgaatagagatgggaccctgaactaagttttagagctatgctgttttg

SEQ ID NO: 1323 - DNA, 74 bp, Artificial Sequence
  Description of Artificial Sequence: Synthetic oligonucleotide
gaaattaatacgactcactatagggatgaataccaggctcctgcagccctgcgttttagagctatgctgttttg

SEQ ID NO: 1324 - DNA, 74 bp, Artificial Sequence
  Description of Artificial Sequence: Synthetic oligonucleotide
gaaattaatacgactcactatagggatgaatacaaacaccagctctgaatcagttttagagctatgctgttttg

SEQ ID NO: 1325 - DNA, 74 bp, Artificial Sequence
  Description of Artificial Sequence: Synthetic oligonucleotide
gaaattaatacgactcactatagggatgaatatctttcttcttcatcagaccgttttagagctatgctgttttg

SEQ ID NO: 1326 - DNA, 74 bp, Artificial Sequence
  Description of Artificial Sequence: Synthetic oligonucleotide
gaaattaatacgactcactatagggatgaataaatagtttgtaacccacagggttttagagctatgctgttttg

SEQ ID NO: 1327 - DNA, 74 bp, Artificial Sequence
  Description of Artificial Sequence: Synthetic oligonucleotide
gaaattaatacgactcactatagggatgaataggaagaagccctggaaagaagttttagagctatgctgttttg

SEQ ID NO: 1328 - DNA, 74 bp, Artificial Sequence
  Description of Artificial Sequence: Synthetic oligonucleotide
gaaattaatacgactcactatagggatgaataccacccacgagcaagtataggttttagagctatgctgttttg

SEQ ID NO: 1329 - DNA, 74 bp, Artificial Sequence
  Description of Artificial Sequence: Synthetic oligonucleotide
gaaattaatacgactcactatagggatgaatagataagggcccagttgagccgttttagagctatgctgttttg

SEQ ID NO: 1330 - DNA, 74 bp, Artificial Sequence
  Description of Artificial Sequence: Synthetic oligonucleotide
gaaattaatacgactcactatagggatgaatagagcagagtgcagatgcagggttttagagctatgctgttttg

SEQ ID NO: 1331 - DNA, 74 bp, Artificial Sequence
  Description of Artificial Sequence: Synthetic oligonucleotide
gaaattaatacgactcactatagggatgaatatttctgagcccaaggcaggagttttagagctatgctgttttg

SEQ ID NO: 1332 - DNA, 74 bp, Artificial Sequence
  Description of Artificial Sequence: Synthetic oligonucleotide
gaaattaatacgactcactatagggatgaatagaaaacatgtgaacaccagggttttagagctatgctgttttg

SEQ ID NO: 1333 - DNA, 74 bp, Artificial Sequence
  Description of Artificial Sequence: Synthetic oligonucleotide
gaaattaatacgactcactatagggatgaataagacataggtatgggtgtcagttttagagctatgctgttttg

SEQ ID NO: 1334 - DNA, 74 bp, Artificial Sequence
  Description of Artificial Sequence: Synthetic oligonucleotide
gaaattaatacgactcactatagggatgaatagagtttagatgagttgggcagttttagagctatgctgttttg

SEQ ID NO: 1335 - DNA, 74 bp, Artificial Sequence
  Description of Artificial Sequence: Synthetic oligonucleotide
gaaattaatacgactcactatagggatgaataggttcttagctggtttaggagttttagagctatgctgttttg

SEQ ID NO: 1336 - DNA, 74 bp, Artificial Sequence
  Description of Artificial Sequence: Synthetic oligonucleotide
gaaattaatacgactcactatagggatgaatagaagggttctcagtaaatcagttttagagctatgctgttttg

SEQ ID NO: 1337 - DNA, 74 bp, Artificial Sequence
  Description of Artificial Sequence: Synthetic oligonucleotide
gaaattaatacgactcactatagggatgaataccacatcactgtatttaaccgttttagagctatgctgttttg

SEQ ID NO: 1338 - DNA, 74 bp, Artificial Sequence
  Description of Artificial Sequence: Synthetic oligonucleotide
gaaattaatacgactcactatagggatgaataaaggcctcagcaatcccacggttttagagctatgctgttttg

SEQ ID NO: 1339 - DNA, 74 bp, Artificial Sequence
  Description of Artificial Sequence: Synthetic oligonucleotide
gaaattaatacgactcactatagggatgaataccacattccttgcctaaggagttttagagctatgctgttttg

SEQ ID NO: 1340 - DNA, 74 bp, Artificial Sequence
  Description of Artificial Sequence: Synthetic oligonucleotide
gaaattaatacgactcactatagggatgaataagagatgtgttactatgccagttttagagctatgctgttttg

SEQ ID NO: 1341 - DNA, 74 bp, Artificial Sequence
  Description of Artificial Sequence: Synthetic oligonucleotide
gaaattaatacgactcactatagggatgaatattggctgagggctgctctgagttttagagctatgctgttttg

SEQ ID NO: 1342 - DNA, 74 bp, Artificial Sequence
  Description of Artificial Sequence: Synthetic oligonucleotide
gaaattaatacgactcactatagggatgaatatgtgtagaacttatcccaaagttttagagctatgctgttttg

SEQ ID NO: 1343 - DNA, 74 bp, Artificial Sequence
  Description of Artificial Sequence: Synthetic oligonucleotide
gaaattaatacgactcactatagggatgaatactattgatgtctgcatgtaggttttagagctatgctgttttg

SEQ ID NO: 1344 - DNA, 74 bp, Artificial Sequence
  Description of Artificial Sequence: Synthetic oligonucleotide
gaaattaatacgactcactatagggatgaatatctgactccagctgtcatcggttttagagctatgctgttttg

SEQ ID NO: 1345 - DNA, 74 bp, Artificial Sequence
  Description of Artificial Sequence: Synthetic oligonucleotide
gaaattaatacgactcactatagggatgaatagtggaacaaagatgtcacacgttttagagctatgctgttttg

SEQ ID NO: 1346 - DNA, 74 bp, Artificial Sequence
  Description of Artificial Sequence: Synthetic oligonucleotide
gaaattaatacgactcactatagggatgaataggttgactcatttagaacaagttttagagctatgctgttttg

SEQ ID NO: 1347 - DNA, 74 bp, Artificial Sequence
  Description of Artificial Sequence: Synthetic oligonucleotide
gaaattaatacgactcactatagggatgaatatgtcccagcggaataagcacgttttagagctatgctgttttg

SEQ ID NO: 1348 - DNA, 74 bp, Artificial Sequence
  Description of Artificial Sequence: Synthetic oligonucleotide
gaaattaatacgactcactatagggatgaatagattattttctataaaggaagttttagagctatgctgttttg

SEQ ID NO: 1349 - DNA, 74 bp, Artificial Sequence
  Description of Artificial Sequence: Synthetic oligonucleotide
gaaattaatacgactcactatagggatgaatattgtttgtggtctggactgggttttagagctatgctgttttg

SEQ ID NO: 1350 - DNA, 74 bp, Artificial Sequence
  Description of Artificial Sequence: Synthetic oligonucleotide
gaaattaatacgactcactatagggatgaataggatgcccagactcatagacgttttagagctatgctgttttg

SEQ ID NO: 1351 - DNA, 74 bp, Artificial Sequence
  Description of Artificial Sequence: Synthetic oligonucleotide
gaaattaatacgactcactatagggatgaatattgaactatctaaaaccacagttttagagctatgctgttttg

SEQ ID NO: 1352 - DNA, 74 bp, Artificial Sequence
  Description of Artificial Sequence: Synthetic oligonucleotide
gaaattaatacgactcactatagggatgaataattggtaggtctaggcagccgttttagagctatgctgttttg

SEQ ID NO: 1353 - DNA, 74 bp, Artificial Sequence
  Description of Artificial Sequence: Synthetic oligonucleotide
gaaattaatacgactcactatagggatgaatagctgtatagaacttgcaacagttttagagctatgctgttttg

SEQ ID NO: 1354 - DNA, 74 bp, Artificial Sequence
  Description of Artificial Sequence: Synthetic oligonucleotide
gaaattaatacgactcactatagggatgaataagtccaagctactcggcagggttttagagctatgctgttttg

SEQ ID NO: 1355 - DNA, 74 bp, Artificial Sequence
  Description of Artificial Sequence: Synthetic oligonucleotide
gaaattaatacgactcactatagggatgaatagcgccgccctcctaccgggcgttttagagctatgctgttttg

SEQ ID NO: 1356 - DNA, 74 bp, Artificial Sequence
  Description of Artificial Sequence: Synthetic oligonucleotide
gaaattaatacgactcactatagggatgaatacagacggtggggtcggggcagttttagagctatgctgttttg

SEQ ID NO: 1357 - DNA, 74 bp, Artificial Sequence
  Description of Artificial Sequence: Synthetic oligonucleotide
gaaattaatacgactcactatagggatgaatagggtcctctcccctgggcccgttttagagctatgctgttttg

SEQ ID NO: 1358 - DNA, 74 bp, Artificial Sequence
  Description of Artificial Sequence: Synthetic oligonucleotide
gaaattaatacgactcactatagggatgaataactcccgccttcctctgcgcgttttagagctatgctgttttg

SEQ ID NO: 1359 - DNA, 74 bp, Artificial Sequence
  Description of Artificial Sequence: Synthetic oligonucleotide
gaaattaatacgactcactatagggatgaataaggccctaggccataaacgggttttagagctatgctgttttg

SEQ ID NO: 1360 - DNA, 74 bp, Artificial Sequence
  Description of Artificial Sequence: Synthetic oligonucleotide
gaaattaatacgactcactatagggatgaatagcgtggcctgaagtgacgccgttttagagctatgctgttttg

SEQ ID NO: 1361 - DNA, 74 bp, Artificial Sequence
  Description of Artificial Sequence: Synthetic oligonucleotide
gaaattaatacgactcactatagggatgaatattatgttcatccagatgcaggttttagagctatgctgttttg

SEQ ID NO: 1362 - DNA, 74 bp, Artificial Sequence
  Description of Artificial Sequence: Synthetic oligonucleotide
gaaattaatacgactcactatagggatgaataaagatatcaagtcaaaatcagttttagagctatgctgttttg

SEQ ID NO: 1363 - DNA, 74 bp, Artificial Sequence
  Description of Artificial Sequence: Synthetic oligonucleotide
gaaattaatacgactcactatagggatgaatatagatgggaaccttctgggcgttttagagctatgctgttttg

SEQ ID NO: 1364 - DNA, 74 bp, Artificial Sequence
  Description of Artificial Sequence: Synthetic oligonucleotide
gaaattaatacgactcactatagggatgaataacagattagatctggcgaaagttttagagctatgctgttttg

SEQ ID NO: 1365 - DNA, 74 bp, Artificial Sequence
  Description of Artificial Sequence: Synthetic oligonucleotide
gaaattaatacgactcactatagggatgaatacaaagcaatgtgaacagaaggttttagagctatgctgttttg

SEQ ID NO: 1366 - DNA, 74 bp, Artificial Sequence
  Description of Artificial Sequence: Synthetic oligonucleotide
gaaattaatacgactcactatagggatgaatagagaaacactggggacaaaagttttagagctatgctgttttg

SEQ ID NO: 1367 - DNA, 74 bp, Artificial Sequence
  Description of Artificial Sequence: Synthetic oligonucleotide
gaaattaatacgactcactatagggatgaataaaatctactccagtgtggccgttttagagctatgctgttttg

SEQ ID NO: 1368 - DNA, 74 bp, Artificial Sequence
  Description of Artificial Sequence: Synthetic oligonucleotide
gaaattaatacgactcactatagggatgaataagaactgccctttgttgacagttttagagctatgctgttttg

SEQ ID NO: 1369 - DNA, 74 bp, Artificial Sequence
  Description of Artificial Sequence: Synthetic oligonucleotide
gaaattaatacgactcactatagggatgaataactctggaataaagtcatgagttttagagctatgctgttttg

SEQ ID NO: 1370 - DNA, 74 bp, Artificial Sequence
  Description of Artificial Sequence: Synthetic oligonucleotide
gaaattaatacgactcactatagggatgaatatctgctaggaggaggggtaggttttagagctatgctgttttg

SEQ ID NO: 1371 - DNA, 74 bp, Artificial Sequence
  Description of Artificial Sequence: Synthetic oligonucleotide
gaaattaatacgactcactatagggatgaatagttaatagcttcagcaaacagttttagagctatgctgttttg

SEQ ID NO: 1372 - DNA, 74 bp, Artificial Sequence
  Description of Artificial Sequence: Synthetic oligonucleotide
gaaattaatacgactcactatagggatgaataccacagtttgtacctacaccgttttagagctatgctgttttg

SEQ ID NO: 1373 - DNA, 74 bp, Artificial Sequence
  Description of Artificial Sequence: Synthetic oligonucleotide
gaaattaatacgactcactatagggatgaatacagccccaggacttaacaacgttttagagctatgctgttttg

SEQ ID NO: 1374 - DNA, 74 bp, Artificial Sequence
  Description of Artificial Sequence: Synthetic oligonucleotide
gaaattaatacgactcactatagggatgaatatttcatatactacctggacggttttagagctatgctgttttg

SEQ ID NO: 1375 - DNA, 74 bp, Artificial Sequence
  Description of Artificial Sequence: Synthetic oligonucleotide
gaaattaatacgactcactatagggatgaataaggcagccgcccgctgccaagttttagagctatgctgttttg

SEQ ID NO: 1376 - DNA, 74 bp, Artificial Sequence
  Description of Artificial Sequence: Synthetic oligonucleotide
gaaattaatacgactcactatagggatgaataccatccacggggctcacagcgttttagagctatgctgttttg

SEQ ID NO: 1377 - DNA, 74 bp, Artificial Sequence
  Description of Artificial Sequence: Synthetic oligonucleotide
gaaattaatacgactcactatagggatgaatatcgatgagtcatcagcatcagttttagagctatgctgttttg

SEQ ID NO: 1378 - DNA, 74 bp, Artificial Sequence
  Description of Artificial Sequence: Synthetic oligonucleotide
gaaattaatacgactcactatagggatgaatacagtcttcttatttgtaaaagttttagagctatgctgttttg

SEQ ID NO: 1379 - DNA, 74 bp, Artificial Sequence
  Description of Artificial Sequence: Synthetic oligonucleotide
gaaattaatacgactcactatagggatgaataaatcacaggcaaatggacacgttttagagctatgctgttttg

SEQ ID NO: 1380 - DNA, 74 bp, Artificial Sequence
  Description of Artificial Sequence: Synthetic oligonucleotide
gaaattaatacgactcactatagggatgaatagcacacacacacacgaaacagttttagagctatgctgttttg

SEQ ID NO: 1381 - DNA, 74 bp, Artificial Sequence
  Description of Artificial Sequence: Synthetic oligonucleotide
gaaattaatacgactcactatagggatgaatagtttggaagtataaagaaaagttttagagctatgctgttttg

SEQ ID NO: 1382 - DNA, 74 bp, Artificial Sequence
  Description of Artificial Sequence: Synthetic oligonucleotide
gaaattaatacgactcactatagggatgaatatgacagtcactacttcagccgttttagagctatgctgttttg

SEQ ID NO: 1383 - DNA, 74 bp, Artificial Sequence
  Description of Artificial Sequence: Synthetic oligonucleotide
gaaattaatacgactcactatagggatgaatatgtaaataccttcaaggagggttttagagctatgctgttttg

SEQ ID NO: 1384 - DNA, 74 bp, Artificial Sequence
  Description of Artificial Sequence: Synthetic oligonucleotide
gaaattaatacgactcactatagggatgaataaagctccttctctggaaagggttttagagctatgctgttttg

SEQ ID NO: 1385 - DNA, 74 bp, Artificial Sequence
  Description of Artificial Sequence: Synthetic oligonucleotide
gaaattaatacgactcactatagggatgaataatacaaaaacgtggtgatccgttttagagctatgctgttttg

SEQ ID NO: 1386 - DNA, 74 bp, Artificial Sequence
  Description of Artificial Sequence: Synthetic oligonucleotide
gaaattaatacgactcactatagggatgaatacaaagggttattttcaatgagttttagagctatgctgttttg

SEQ ID NO: 1387 - DNA, 74 bp, Artificial Sequence
  Description of Artificial Sequence: Synthetic oligonucleotide
gaaattaatacgactcactatagggatgaataccacaagttgattcatgtcagttttagagctatgctgttttg

SEQ ID NO: 1388 - DNA, 74 bp, Artificial Sequence
  Description of Artificial Sequence: Synthetic oligonucleotide
gaaattaatacgactcactatagggatgaatattatggccaatgaaacgtaagttttagagctatgctgttttg

SEQ ID NO: 1389 - DNA, 74 bp, Artificial Sequence
  Description of Artificial Sequence: Synthetic oligonucleotide
gaaattaatacgactcactatagggatgaatagcagcaatgttcactgctccgttttagagctatgctgttttg

SEQ ID NO: 1390 - DNA, 74 bp, Artificial Sequence
  Description of Artificial Sequence: Synthetic oligonucleotide
gaaattaatacgactcactatagggatgaatattatttccaggagttgctgggttttagagctatgctgttttg

SEQ ID NO: 1391 - DNA, 74 bp, Artificial Sequence
  Description of Artificial Sequence: Synthetic oligonucleotide
gaaattaatacgactcactatagggatgaatatcactgtggatcccagccccgttttagagctatgctgttttg

SEQ ID NO: 1392 - DNA, 74 bp, Artificial Sequence
  Description of Artificial Sequence: Synthetic oligonucleotide
gaaattaatacgactcactatagggatgaatatttgaaagagaaagaagcacgttttagagctatgctgttttg

SEQ ID NO: 1393 - DNA, 74 bp, Artificial Sequence
  Description of Artificial Sequence: Synthetic oligonucleotide
gaaattaatacgactcactatagggatgaataaaaaattagattaagggtgggttttagagctatgctgttttg

SEQ ID NO: 1394 - DNA, 74 bp, Artificial Sequence
  Description of Artificial Sequence: Synthetic oligonucleotide
gaaattaatacgactcactatagggatgaataaaattataaagtgccccagagttttagagctatgctgttttg

SEQ ID NO: 1395 - DNA, 74 bp, Artificial Sequence
  Description of Artificial Sequence: Synthetic oligonucleotide
gaaattaatacgactcactatagggatgaatacgtcctcacagcctagctgagttttagagctatgctgttttg

SEQ ID NO: 1396 - DNA, 74 bp, Artificial Sequence
  Description of Artificial Sequence: Synthetic oligonucleotide
gaaattaatacgactcactatagggatgaatattttccccaccccgcgaggggttttagagctatgctgttttg

SEQ ID NO: 1397 - DNA, 74 bp, Artificial Sequence
  Description of Artificial Sequence: Synthetic oligonucleotide
gaaattaatacgactcactatagggatgaatagcgggggcgcgaggtcccgagttttagagctatgctgttttg

SEQ ID NO: 1398 - DNA, 74 bp, Artificial Sequence
  Description of Artificial Sequence: Synthetic oligonucleotide
gaaattaatacgactcactatagggatgaataggaccgaagttggggaaggggttttagagctatgctgttttg

SEQ ID NO: 1399 - DNA, 74 bp, Artificial Sequence
  Description of Artificial Sequence: Synthetic oligonucleotide
gaaattaatacgactcactatagggatgaatagcagtactgtttcttccggcgttttagagctatgctgttttg

SEQ ID NO: 1400 - DNA, 74 bp, Artificial Sequence
  Description of Artificial Sequence: Synthetic oligonucleotide
gaaattaatacgactcactatagggatgaatagaaagcggccgccgggcggggttttagagctatgctgttttg

SEQ ID NO: 1401 - DNA, 74 bp, Artificial Sequence
  Description of Artificial Sequence: Synthetic oligonucleotide
gaaattaatacgactcactatagggatgaatactgatagccaggcgtagccggttttagagctatgctgttttg

SEQ ID NO: 1402 - DNA, 74 bp, Artificial Sequence
  Description of Artificial Sequence: Synthetic oligonucleotide
gaaattaatacgactcactatagggatgaatagaagctgattgatgggcaaagttttagagctatgctgttttg

SEQ ID NO: 1403 - DNA, 74 bp, Artificial Sequence
  Description of Artificial Sequence: Synthetic oligonucleotide
gaaattaatacgactcactatagggatgaatattattaaacaaaaagaccaggttttagagctatgctgttttg

SEQ ID NO: 1404 - DNA, 74 bp, Artificial Sequence
  Description of Artificial Sequence: Synthetic oligonucleotide
gaaattaatacgactcactatagggatgaataacactcaaattaacaccggagttttagagctatgctgttttg

SEQ ID NO: 1405 - DNA, 74 bp, Artificial Sequence
  Description of Artificial Sequence: Synthetic oligonucleotide
gaaattaatacgactcactatagggatgaataacaaataatgtatccagtaagttttagagctatgctgttttg

SEQ ID NO: 1406 - DNA, 74 bp, Artificial Sequence
  Description of Artificial Sequence: Synthetic oligonucleotide
gaaattaatacgactcactatagggatgaatacaaagactggctgggcgcaggttttagagctatgctgttttg

SEQ ID NO: 1407 - DNA, 74 bp, Artificial Sequence
  Description of Artificial Sequence: Synthetic oligonucleotide
gaaattaatacgactcactatagggatgaataaaaggaaacaacagggaaaagttttagagctatgctgttttg

SEQ ID NO: 1408 - DNA, 74 bp, Artificial Sequence
  Description of Artificial Sequence: Synthetic oligonucleotide
gaaattaatacgactcactatagggatgaatatggctgtcatactcgacacagttttagagctatgctgttttg

SEQ ID NO: 1409 - DNA, 74 bp, Artificial Sequence
  Description of Artificial Sequence: Synthetic oligonucleotide
gaaattaatacgactcactatagggatgaatactacctgattctgttggagggttttagagctatgctgttttg

SEQ ID NO: 1410 - DNA, 74 bp, Artificial Sequence
  Description of Artificial Sequence: Synthetic oligonucleotide
gaaattaatacgactcactatagggatgaataagggttccaccctgttgaccgttttagagctatgctgttttg

SEQ ID NO: 1411 - DNA, 74 bp, Artificial Sequence
  Description of Artificial Sequence: Synthetic oligonucleotide
gaaattaatacgactcactatagggatgaataacacaaaaaagataataaaagttttagagctatgctgttttg

SEQ ID NO: 1412 - DNA, 74 bp, Artificial Sequence
  Description of Artificial Sequence: Synthetic oligonucleotide
gaaattaatacgactcactatagggatgaatagcgggaggggtgtggggggagttttagagctatgctgttttg

SEQ ID NO: 1413 - DNA, 74 bp, Artificial Sequence
  Description of Artificial Sequence: Synthetic oligonucleotide
gaaattaatacgactcactatagggatgaataacagggttgcccgggagcaggttttagagctatgctgttttg

SEQ ID NO: 1414 - DNA, 74 bp, Artificial Sequence
  Description of Artificial Sequence: Synthetic oligonucleotide
gaaattaatacgactcactatagggatgaatatattaactaattaggtatcagttttagagctatgctgttttg

SEQ ID NO: 1415 - DNA, 74 bp, Artificial Sequence
  Description of Artificial Sequence: Synthetic oligonucleotide
gaaattaatacgactcactatagggatgaatactgtggaatttgtacacgaggttttagagctatgctgttttg

SEQ ID NO: 1416 - DNA, 74 bp, Artificial Sequence
  Description of Artificial Sequence: Synthetic oligonucleotide
gaaattaatacgactcactatagggatgaatatatggcttaaaaaatacaaggttttagagctatgctgttttg

SEQ ID NO: 1417 - DNA, 74 bp, Artificial Sequence
  Description of Artificial Sequence: Synthetic oligonucleotide
gaaattaatacgactcactatagggatgaatagagtaacacagaagggaggcgttttagagctatgctgttttg

SEQ ID NO: 1418 - DNA, 74 bp, Artificial Sequence
  Description of Artificial Sequence: Synthetic oligonucleotide
gaaattaatacgactcactatagggatgaatattgacctttttgaaaactgggttttagagctatgctgttttg

SEQ ID NO: 1419 - DNA, 74 bp, Artificial Sequence
  Description of Artificial Sequence: Synthetic oligonucleotide
gaaattaatacgactcactatagggatgaatagcacaggcccaacacacagcgttttagagctatgctgttttg

SEQ ID NO: 1420 - DNA, 74 bp, Artificial Sequence
  Description of Artificial Sequence: Synthetic oligonucleotide
gaaattaatacgactcactatagggatgaatatgggtttcttactgatcagagttttagagctatgctgttttg

SEQ ID NO: 1421 - DNA, 74 bp, Artificial Sequence
  Description of Artificial Sequence: Synthetic oligonucleotide
gaaattaatacgactcactatagggatgaataatgttacattttataaaaaagttttagagctatgctgttttg

SEQ ID NO: 1422 - DNA, 74 bp, Artificial Sequence
  Description of Artificial Sequence: Synthetic oligonucleotide
gaaattaatacgactcactatagggatgaatactgggattaccagcgtgaccgttttagagctatgctgttttg

SEQ ID NO: 1423 - DNA, 74 bp, Artificial Sequence
  Description of Artificial Sequence: Synthetic oligonucleotide
gaaattaatacgactcactatagggatgaatagatcagggtagaccatgagggttttagagctatgctgttttg

SEQ ID NO: 1424 - DNA, 74 bp, Artificial Sequence
  Description of Artificial Sequence: Synthetic oligonucleotide
gaaattaatacgactcactatagggatgaatattagaagagtacaacactacgttttagagctatgctgttttg

SEQ ID NO: 1425 - DNA, 74 bp, Artificial Sequence
  Description of Artificial Sequence: Synthetic oligonucleotide
gaaattaatacgactcactatagggatgaatatgaatcagaaatactggagggttttagagctatgctgttttg

SEQ ID NO: 1426 - DNA, 74 bp, Artificial Sequence
  Description of Artificial Sequence: Synthetic oligonucleotide
gaaattaatacgactcactatagggatgaataactgctgccgtataccgtacgttttagagctatgctgttttg

SEQ ID NO: 1427 - DNA, 74 bp, Artificial Sequence
  Description of Artificial Sequence: Synthetic oligonucleotide
gaaattaatacgactcactatagggatgaatagaaaataataaacgaccacagttttagagctatgctgttttg

SEQ ID NO: 1428 - DNA, 74 bp, Artificial Sequence
  Description of Artificial Sequence: Synthetic oligonucleotide
gaaattaatacgactcactatagggatgaatacattataatgtcactcctcagttttagagctatgctgttttg

SEQ ID NO: 1429 - DNA, 74 bp, Artificial Sequence
  Description of Artificial Sequence: Synthetic oligonucleotide
gaaattaatacgactcactatagggatgaatattgttcatgtgatgtgctgcgttttagagctatgctgttttg

SEQ ID NO: 1430 - DNA, 74 bp, Artificial Sequence
  Description of Artificial Sequence: Synthetic oligonucleotide
gaaattaatacgactcactatagggatgaatacattgatccttggtttgagggttttagagctatgctgttttg

SEQ ID NO: 1431 - DNA, 74 bp, Artificial Sequence
  Description of Artificial Sequence: Synthetic oligonucleotide
gaaattaatacgactcactatagggatgaatagggtttctaagttccactaagttttagagctatgctgttttg

SEQ ID NO: 1432 - DNA, 74 bp, Artificial Sequence
  Description of Artificial Sequence: Synthetic oligonucleotide
gaaattaatacgactcactatagggatgaatatcaagaagaccgcttacacagttttagagctatgctgttttg

SEQ ID NO: 1433 - DNA, 74 bp, Artificial Sequence
  Description of Artificial Sequence: Synthetic oligonucleotide
gaaattaatacgactcactatagggatgaataccagggcagctgaaccatacgttttagagctatgctgttttg

SEQ ID NO: 1434 - DNA, 74 bp, Artificial Sequence
  Description of Artificial Sequence: Synthetic oligonucleotide
gaaattaatacgactcactatagggatgaatacaggacctggcccggcgcgggttttagagctatgctgttttg

SEQ ID NO: 1435 - DNA, 74 bp, Artificial Sequence
  Description of Artificial Sequence: Synthetic oligonucleotide
gaaattaatacgactcactatagggatgaatagctgtgtcagtgaacactaggttttagagctatgctgttttg

SEQ ID NO: 1436 - DNA, 74 bp, Artificial Sequence
  Description of Artificial Sequence: Synthetic oligonucleotide
gaaattaatacgactcactatagggatgaataggaaatgctgggcagtggaagttttagagctatgctgttttg

SEQ ID NO: 1437 - DNA, 74 bp, Artificial Sequence
  Description of Artificial Sequence: Synthetic oligonucleotide
gaaattaatacgactcactatagggatgaatatttctgctaatacatccccagttttagagctatgctgttttg

SEQ ID NO: 1438 - DNA, 74 bp, Artificial Sequence
  Description of Artificial Sequence: Synthetic oligonucleotide
gaaattaatacgactcactatagggatgaatatggtgaggaggcagaaaggagttttagagctatgctgttttg

SEQ ID NO: 1439 - DNA, 74 bp, Artificial Sequence
  Description of Artificial Sequence: Synthetic oligonucleotide
gaaattaatacgactcactatagggatgaatagatcgctggaactcaggggcgttttagagctatgctgttttg

SEQ ID NO: 1440 - DNA, 74 bp, Artificial Sequence
  Description of Artificial Sequence: Synthetic oligonucleotide
gaaattaatacgactcactatagggatgaatacaacaagcctagcctcgcgcgttttagagctatgctgttttg

SEQ ID NO: 1441 - DNA, 74 bp, Artificial Sequence
  Description of Artificial Sequence: Synthetic oligonucleotide
gaaattaatacgactcactatagggatgaatacggcgcaagggcagcggcacgttttagagctatgctgttttg

SEQ ID NO: 1442 - DNA, 74 bp, Artificial Sequence
  Description of Artificial Sequence: Synthetic oligonucleotide
gaaattaatacgactcactatagggatgaatatggagattcttcctcagtgcgttttagagctatgctgttttg

SEQ ID NO: 1443 - DNA, 74 bp, Artificial Sequence
  Description of Artificial Sequence: Synthetic oligonucleotide
gaaattaatacgactcactatagggatgaatactgcagcaatgccccccaccgttttagagctatgctgttttg

SEQ ID NO: 1444 - DNA, 74 bp, Artificial Sequence
  Description of Artificial Sequence: Synthetic oligonucleotide
gaaattaatacgactcactatagggatgaatagtggtggggatggggaacgggttttagagctatgctgttttg

SEQ ID NO: 1445 - DNA, 74 bp, Artificial Sequence
  Description of Artificial Sequence: Synthetic oligonucleotide
gaaattaatacgactcactatagggatgaatactaggacttcttggaggtcagttttagagctatgctgttttg

SEQ ID NO: 1446 - DNA, 74 bp, Artificial Sequence
  Description of Artificial Sequence: Synthetic oligonucleotide
gaaattaatacgactcactatagggatgaataaaggccaagaagatggggcagttttagagctatgctgttttg

SEQ ID NO: 1447 - DNA, 74 bp, Artificial Sequence
  Description of Artificial Sequence: Synthetic oligonucleotide
gaaattaatacgactcactatagggatgaatatattttaaaagcatttgggcgttttagagctatgctgttttg

SEQ ID NO: 1448 - DNA, 74 bp, Artificial Sequence
  Description of Artificial Sequence: Synthetic oligonucleotide
gaaattaatacgactcactatagggatgaatatgttccagccaacattgtaagttttagagctatgctgttttg

SEQ ID NO: 1449 - DNA, 74 bp, Artificial Sequence
  Description of Artificial Sequence: Synthetic oligonucleotide
gaaattaatacgactcactatagggatgaatagtaagaaagtggtaaccacagttttagagctatgctgttttg

SEQ ID NO: 1450 - DNA, 74 bp, Artificial Sequence
  Description of Artificial Sequence: Synthetic oligonucleotide
gaaattaatacgactcactatagggatgaatataaatatgcatgtctaaaaagttttagagctatgctgttttg

SEQ ID NO: 1451 - DNA, 74 bp, Artificial Sequence
  Description of Artificial Sequence: Synthetic oligonucleotide
gaaattaatacgactcactatagggatgaatactggaagaaccttctgccccgttttagagctatgctgttttg

SEQ ID NO: 1452 - DNA, 74 bp, Artificial Sequence
  Description of Artificial Sequence: Synthetic oligonucleotide
gaaattaatacgactcactatagggatgaatatgtttcagggcatggtgtgggttttagagctatgctgttttg

SEQ ID NO: 1453 - DNA, 74 bp, Artificial Sequence
  Description of Artificial Sequence: Synthetic oligonucleotide
gaaattaatacgactcactatagggatgaataaatcctaaattcctgggcaagttttagagctatgctgttttg

SEQ ID NO: 1454 - DNA, 74 bp, Artificial Sequence
  Description of Artificial Sequence: Synthetic oligonucleotide
gaaattaatacgactcactatagggatgaataggatgctgcagtgaggcggagttttagagctatgctgttttg

SEQ ID NO: 1455 - DNA, 74 bp, Artificial Sequence
  Description of Artificial Sequence: Synthetic oligonucleotide
gaaattaatacgactcactatagggatgaatacaggaagacggtttgagcccgttttagagctatgctgttttg

SEQ ID NO: 1456 - DNA, 74 bp, Artificial Sequence
  Description of Artificial Sequence: Synthetic oligonucleotide
gaaattaatacgactcactatagggatgaatatttggcaaatagctgggcgggttttagagctatgctgttttg

SEQ ID NO: 1457 - DNA, 74 bp, Artificial Sequence
  Description of Artificial Sequence: Synthetic oligonucleotide
gaaattaatacgactcactatagggatgaatattgcctcaaaaaaaaggaaggttttagagctatgctgttttg

SEQ ID NO: 1458 - DNA, 74 bp, Artificial Sequence
  Description of Artificial Sequence: Synthetic oligonucleotide
gaaattaatacgactcactatagggatgaataacattgatccacataaggcggttttagagctatgctgttttg

SEQ ID NO: 1459 - DNA, 74 bp, Artificial Sequence
  Description of Artificial Sequence: Synthetic oligonucleotide
gaaattaatacgactcactatagggatgaataagtggtcatgcaccttcccagttttagagctatgctgttttg

SEQ ID NO: 1460 - DNA, 74 bp, Artificial Sequence
  Description of Artificial Sequence: Synthetic oligonucleotide
gaaattaatacgactcactatagggatgaatatcttcccaggcctggtgaacgttttagagctatgctgttttg

SEQ ID NO: 1461 - DNA, 74 bp, Artificial Sequence
  Description of Artificial Sequence: Synthetic oligonucleotide
gaaattaatacgactcactatagggatgaatactatgcctgacaatcccagggttttagagctatgctgttttg

SEQ ID NO: 1462 - DNA, 74 bp, Artificial Sequence
  Description of Artificial Sequence: Synthetic oligonucleotide
gaaattaatacgactcactatagggatgaataccaggggactgcgagggaacgttttagagctatgctgttttg

SEQ ID NO: 1463 - DNA, 74 bp, Artificial Sequence
  Description of Artificial Sequence: Synthetic oligonucleotide
gaaattaatacgactcactatagggatgaataacacacctagggcctggccagttttagagctatgctgttttg

SEQ ID NO: 1464 - DNA, 74 bp, Artificial Sequence
  Description of Artificial Sequence: Synthetic oligonucleotide
gaaattaatacgactcactatagggatgaatacattctcccccttgagcaaagttttagagctatgctgttttg

SEQ ID NO: 1465 - DNA, 74 bp, Artificial Sequence
  Description of Artificial Sequence: Synthetic oligonucleotide
gaaattaatacgactcactatagggatgaataagtgcgatacatctatacaagttttagagctatgctgttttg

SEQ ID NO: 1466 - DNA, 74 bp, Artificial Sequence
  Description of Artificial Sequence: Synthetic oligonucleotide
gaaattaatacgactcactatagggatgaatagagagttgcttgaagccgaggttttagagctatgctgttttg

SEQ ID NO: 1467 - DNA, 74 bp, Artificial Sequence
  Description of Artificial Sequence: Synthetic oligonucleotide
gaaattaatacgactcactatagggatgaataatgctgtgctcccctcctcagttttagagctatgctgttttg

SEQ ID NO: 1468 - DNA, 74 bp, Artificial Sequence
  Description of Artificial Sequence: Synthetic oligonucleotide
gaaattaatacgactcactatagggatgaatatcacaaagcctgcaaaatcagttttagagctatgctgttttg

SEQ ID NO: 1469 - DNA, 74 bp, Artificial Sequence
  Description of Artificial Sequence: Synthetic oligonucleotide
gaaattaatacgactcactatagggatgaatatggtctgcagtctgccctgagttttagagctatgctgttttg

SEQ ID NO: 1470 - DNA, 74 bp, Artificial Sequence
  Description of Artificial Sequence: Synthetic oligonucleotide
gaaattaatacgactcactatagggatgaataatgtttaaaactacttcacggttttagagctatgctgttttg

SEQ ID NO: 1471 - DNA, 74 bp, Artificial Sequence
  Description of Artificial Sequence: Synthetic oligonucleotide
gaaattaatacgactcactatagggatgaataatggtaaatgtagtgcgaccgttttagagctatgctgttttg

SEQ ID NO: 1472 - DNA, 74 bp, Artificial Sequence
  Description of Artificial Sequence: Synthetic oligonucleotide
gaaattaatacgactcactatagggatgaatatttccttgcagttggccaaggttttagagctatgctgttttg

SEQ ID NO: 1473 - DNA, 74 bp, Artificial Sequence
  Description of Artificial Sequence: Synthetic oligonucleotide
gaaattaatacgactcactatagggatgaatactgtgggcatatggtcccaggttttagagctatgctgttttg

SEQ ID NO: 1474 - DNA, 74 bp, Artificial Sequence
  Description of Artificial Sequence: Synthetic oligonucleotide
gaaattaatacgactcactatagggatgaatagcaggcagaactggtgaaaggttttagagctatgctgttttg

SEQ ID NO: 1475 - DNA, 74 bp, Artificial Sequence
  Description of Artificial Sequence: Synthetic oligonucleotide
gaaattaatacgactcactatagggatgaatactgagggcaaacctctgtaggttttagagctatgctgttttg

SEQ ID NO: 1476 - DNA, 74 bp, Artificial Sequence
  Description of Artificial Sequence: Synthetic oligonucleotide
gaaattaatacgactcactatagggatgaatatctgcgccgaagccagggaagttttagagctatgctgttttg

SEQ ID NO: 1477 - DNA, 74 bp, Artificial Sequence
  Description of Artificial Sequence: Synthetic oligonucleotide
gaaattaatacgactcactatagggatgaataaggagagaagaaggttagcagttttagagctatgctgttttg

SEQ ID NO: 1478 - DNA, 74 bp, Artificial Sequence
  Description of Artificial Sequence: Synthetic oligonucleotide
gaaattaatacgactcactatagggatgaatagctgctcagggggtgggaacgttttagagctatgctgttttg

SEQ ID NO: 1479 - DNA, 74 bp, Artificial Sequence
  Description of Artificial Sequence: Synthetic oligonucleotide
gaaattaatacgactcactatagggatgaataaagtttacggggttgggtgggttttagagctatgctgttttg

SEQ ID NO: 1480 - DNA, 74 bp, Artificial Sequence
  Description of Artificial Sequence: Synthetic oligonucleotide
gaaattaatacgactcactatagggatgaatattatgtcatttacacaataagttttagagctatgctgttttg

SEQ ID NO: 1481 - DNA, 74 bp, Artificial Sequence
  Description of Artificial Sequence: Synthetic oligonucleotide
gaaattaatacgactcactatagggatgaataagtcaaactgtgtcatgtaggttttagagctatgctgttttg

SEQ ID NO: 1482 - DNA, 74 bp, Artificial Sequence
  Description of Artificial Sequence: Synthetic oligonucleotide
gaaattaatacgactcactatagggatgaataggagttgaagatacatacaagttttagagctatgctgttttg

SEQ ID NO: 1483 - DNA, 74 bp, Artificial Sequence
  Description of Artificial Sequence: Synthetic oligonucleotide
gaaattaatacgactcactatagggatgaataacgtggtgttgacaaagaacgttttagagctatgctgttttg

SEQ ID NO: 1484 - DNA, 74 bp, Artificial Sequence
  Description of Artificial Sequence: Synthetic oligonucleotide
gaaattaatacgactcactatagggatgaatatgatcatcagaaagcactcagttttagagctatgctgttttg

SEQ ID NO: 1485 - DNA, 74 bp, Artificial Sequence
  Description of Artificial Sequence: Synthetic oligonucleotide
gaaattaatacgactcactatagggatgaatacgagtgtgaggataacgagggttttagagctatgctgttttg

SEQ ID NO: 1486 - DNA, 74 bp, Artificial Sequence
  Description of Artificial Sequence: Synthetic oligonucleotide
gaaattaatacgactcactatagggatgaatagggtgggcgggggcgggggggttttagagctatgctgttttg

SEQ ID NO: 1487 - DNA, 74 bp, Artificial Sequence
  Description of Artificial Sequence: Synthetic oligonucleotide
gaaattaatacgactcactatagggatgaatacaacctgcatccctgagtaagttttagagctatgctgttttg

SEQ ID NO: 1488 - DNA, 74 bp, Artificial Sequence
  Description of Artificial Sequence: Synthetic oligonucleotide
gaaattaatacgactcactatagggatgaatattttaatgaaggtagggagggttttagagctatgctgttttg

SEQ ID NO: 1489 - DNA, 74 bp, Artificial Sequence
  Description of Artificial Sequence: Synthetic oligonucleotide
gaaattaatacgactcactatagggatgaatatcacccagggtggagtgcaggttttagagctatgctgttttg

SEQ ID NO: 1490 - DNA, 74 bp, Artificial Sequence
  Description of Artificial Sequence: Synthetic oligonucleotide
gaaattaatacgactcactatagggatgaatattgatccgagtcctgtgaaagttttagagctatgctgttttg

SEQ ID NO: 1491 - DNA, 74 bp, Artificial Sequence
  Description of Artificial Sequence: Synthetic oligonucleotide
gaaattaatacgactcactatagggatgaataacttattcataaaagtgggagttttagagctatgctgttttg

SEQ ID NO: 1492 - DNA, 74 bp, Artificial Sequence
  Description of Artificial Sequence: Synthetic oligonucleotide
gaaattaatacgactcactatagggatgaatatcaagtgatattgttcctgagttttagagctatgctgttttg

SEQ ID NO: 1493 - DNA, 74 bp, Artificial Sequence
  Description of Artificial Sequence: Synthetic oligonucleotide
gaaattaatacgactcactatagggatgaatatggtcctgctctgcctgtgcgttttagagctatgctgttttg

SEQ ID NO: 1494 - DNA, 74 bp, Artificial Sequence
  Description of Artificial Sequence: Synthetic oligonucleotide
gaaattaatacgactcactatagggatgaataatttaagtgacagtcgctgcgttttagagctatgctgttttg

SEQ ID NO: 1495 - DNA, 74 bp, Artificial Sequence
  Description of Artificial Sequence: Synthetic oligonucleotide
gaaattaatacgactcactatagggatgaataacagttgtggccctcactcagttttagagctatgctgttttg

SEQ ID NO: 1496 - DNA, 74 bp, Artificial Sequence
  Description of Artificial Sequence: Synthetic oligonucleotide
gaaattaatacgactcactatagggatgaatataatcacattgcaaggaacagttttagagctatgctgttttg

SEQ ID NO: 1497 - DNA, 74 bp, Artificial Sequence
  Description of Artificial Sequence: Synthetic oligonucleotide
gaaattaatacgactcactatagggatgaatattgaggcctagacttgcaacgttttagagctatgctgttttg

SEQ ID NO: 1498 - DNA, 74 bp, Artificial Sequence
  Description of Artificial Sequence: Synthetic oligonucleotide
gaaattaatacgactcactatagggatgaatagtggtctttaatctgtaaccgttttagagctatgctgttttg

SEQ ID NO: 1499 - DNA, 74 bp, Artificial Sequence
  Description of Artificial Sequence: Synthetic oligonucleotide
gaaattaatacgactcactatagggatgaataatggttctttcaatctgggcgttttagagctatgctgttttg

SEQ ID NO: 1500 - DNA, 74 bp, Artificial Sequence
  Description of Artificial Sequence: Synthetic oligonucleotide
gaaattaatacgactcactatagggatgaatactttgtgcagatgcaacggggttttagagctatgctgttttg

SEQ ID NO: 1501 - DNA, 74 bp, Artificial Sequence
  Description of Artificial Sequence: Synthetic oligonucleotide
gaaattaatacgactcactatagggatgaataggatgctaaagttattgtgcgttttagagctatgctgttttg

SEQ ID NO: 1502 - DNA, 74 bp, Artificial Sequence
  Description of Artificial Sequence: Synthetic oligonucleotide
gaaattaatacgactcactatagggatgaatactttaatgatcggctcagaggttttagagctatgctgttttg

SEQ ID NO: 1503 - DNA, 74 bp, Artificial Sequence
  Description of Artificial Sequence: Synthetic oligonucleotide
gaaattaatacgactcactatagggatgaataagtcattcatattcaaatcagttttagagctatgctgttttg

SEQ ID NO: 1504 - DNA, 74 bp, Artificial Sequence
  Description of Artificial Sequence: Synthetic oligonucleotide
gaaattaatacgactcactatagggatgaataacacacactcgcacgtctcagttttagagctatgctgttttg

SEQ ID NO: 1505 - DNA, 74 bp, Artificial Sequence
  Description of Artificial Sequence: Synthetic oligonucleotide
gaaattaatacgactcactatagggatgaataaggaggaggacagtgtctcagttttagagctatgctgttttg

SEQ ID NO: 1506 - DNA, 74 bp, Artificial Sequence
  Description of Artificial Sequence: Synthetic oligonucleotide
gaaattaatacgactcactatagggatgaataggagcagtatcgatctctgggttttagagctatgctgttttg

SEQ ID NO: 1507 - DNA, 74 bp, Artificial Sequence
  Description of Artificial Sequence: Synthetic oligonucleotide
gaaattaatacgactcactatagggatgaatagtttgctgaacttactctgagttttagagctatgctgttttg

SEQ ID NO: 1508 - DNA, 74 bp, Artificial Sequence
  Description of Artificial Sequence: Synthetic oligonucleotide
gaaattaatacgactcactatagggatgaatagcagtatcggtggcgtgtgcgttttagagctatgctgttttg

SEQ ID NO: 1509 - DNA, 74 bp, Artificial Sequence
  Description of Artificial Sequence: Synthetic oligonucleotide
gaaattaatacgactcactatagggatgaatagaaggtgcacggccccgtgggttttagagctatgctgttttg

SEQ ID NO: 1510 - DNA, 74 bp, Artificial Sequence
  Description of Artificial Sequence: Synthetic oligonucleotide
gaaattaatacgactcactatagggatgaataccggcggggatgggcgggcagttttagagctatgctgttttg

SEQ ID NO: 1511 - DNA, 74 bp, Artificial Sequence
  Description of Artificial Sequence: Synthetic oligonucleotide
gaaattaatacgactcactatagggatgaataggaccccagggccgcaccccgttttagagctatgctgttttg

SEQ ID NO: 1512 - DNA, 74 bp, Artificial Sequence
  Description of Artificial Sequence: Synthetic oligonucleotide
gaaattaatacgactcactatagggatgaatagttcccacacccttagccgcgttttagagctatgctgttttg

SEQ ID NO: 1513 - DNA, 74 bp, Artificial Sequence
  Description of Artificial Sequence: Synthetic oligonucleotide
gaaattaatacgactcactatagggatgaatagcatcccctggcaattcacagttttagagctatgctgttttg

SEQ ID NO: 1514 - DNA, 74 bp, Artificial Sequence
  Description of Artificial Sequence: Synthetic oligonucleotide
gaaattaatacgactcactatagggatgaatatgtcatcctttccttgaaaagttttagagctatgctgttttg

SEQ ID NO: 1515 - DNA, 74 bp, Artificial Sequence
  Description of Artificial Sequence: Synthetic oligonucleotide
gaaattaatacgactcactatagggatgaatatgatcaagagagataaatgcgttttagagctatgctgttttg

SEQ ID NO: 1516 - DNA, 74 bp, Artificial Sequence
  Description of Artificial Sequence: Synthetic oligonucleotide
gaaattaatacgactcactatagggatgaatagctgggatggagagtcatgcgttttagagctatgctgttttg

SEQ ID NO: 1517 - DNA, 74 bp, Artificial Sequence
  Description of Artificial Sequence: Synthetic oligonucleotide
gaaattaatacgactcactatagggatgaataaaatgagttcccactagcaggttttagagctatgctgttttg

SEQ ID NO: 1518 - DNA, 74 bp, Artificial Sequence
  Description of Artificial Sequence: Synthetic oligonucleotide
gaaattaatacgactcactatagggatgaatatggataataaacacaggggggttttagagctatgctgttttg

SEQ ID NO: 1519 - DNA, 74 bp, Artificial Sequence
  Description of Artificial Sequence: Synthetic oligonucleotide
gaaattaatacgactcactatagggatgaataggagtctcaacaagggatgcgttttagagctatgctgttttg

SEQ ID NO: 1520 - DNA, 74 bp, Artificial Sequence
  Description of Artificial Sequence: Synthetic oligonucleotide
gaaattaatacgactcactatagggatgaatacgatcctgggtaatccggaagttttagagctatgctgttttg

SEQ ID NO: 1521 - DNA, 74 bp, Artificial Sequence
  Description of Artificial Sequence: Synthetic oligonucleotide
gaaattaatacgactcactatagggatgaataacagttaaaccaaattccaggttttagagctatgctgttttg

SEQ ID NO: 1522 - DNA, 74 bp, Artificial Sequence
  Description of Artificial Sequence: Synthetic oligonucleotide
gaaattaatacgactcactatagggatgaataataaaggagagtagtggagggttttagagctatgctgttttg

SEQ ID NO: 1523 - DNA, 74 bp, Artificial Sequence
  Description of Artificial Sequence: Synthetic oligonucleotide
gaaattaatacgactcactatagggatgaataagttctctgaagaaagctgcgttttagagctatgctgttttg

SEQ ID NO: 1524 - DNA, 74 bp, Artificial Sequence
  Description of Artificial Sequence: Synthetic oligonucleotide
gaaattaatacgactcactatagggatgaatagtttgtttcccttgtggcaagttttagagctatgctgttttg

SEQ ID NO: 1525 - DNA, 74 bp, Artificial Sequence
  Description of Artificial Sequence: Synthetic oligonucleotide
gaaattaatacgactcactatagggatgaatacagctggctattaattccccgttttagagctatgctgttttg

SEQ ID NO: 1526 - DNA, 74 bp, Artificial Sequence
  Description of Artificial Sequence: Synthetic oligonucleotide
gaaattaatacgactcactatagggatgaatagcaataaccatcaaggcacagttttagagctatgctgttttg

SEQ ID NO: 1527 - DNA, 74 bp, Artificial Sequence
  Description of Artificial Sequence: Synthetic oligonucleotide
gaaattaatacgactcactatagggatgaatacatgggaacagttggaaagggttttagagctatgctgttttg

SEQ ID NO: 1528 - DNA, 74 bp, Artificial Sequence
  Description of Artificial Sequence: Synthetic oligonucleotide
gaaattaatacgactcactatagggatgaatacaggtgtggcatccaaaccagttttagagctatgctgttttg

SEQ ID NO: 1529 - DNA, 74 bp, Artificial Sequence
  Description of Artificial Sequence: Synthetic oligonucleotide
gaaattaatacgactcactatagggatgaataccaaagttaatatctgaaaagttttagagctatgctgttttg

SEQ ID NO: 1530 - DNA, 74 bp, Artificial Sequence
  Description of Artificial Sequence: Synthetic oligonucleotide
gaaattaatacgactcactatagggatgaatatatgttcactctataaataggttttagagctatgctgttttg

SEQ ID NO: 1531 - DNA, 74 bp, Artificial Sequence
  Description of Artificial Sequence: Synthetic oligonucleotide
gaaattaatacgactcactatagggatgaataattgggcccaaagattacaggttttagagctatgctgttttg

SEQ ID NO: 1532 - DNA, 74 bp, Artificial Sequence
  Description of Artificial Sequence: Synthetic oligonucleotide
gaaattaatacgactcactatagggatgaatacttgtgatgaatctaaaggcgttttagagctatgctgttttg

SEQ ID NO: 1533 - DNA, 74 bp, Artificial Sequence
  Description of Artificial Sequence: Synthetic oligonucleotide
gaaattaatacgactcactatagggatgaatattttaacctcagccatgaacgttttagagctatgctgttttg

SEQ ID NO: 1534 - DNA, 74 bp, Artificial Sequence
  Description of Artificial Sequence: Synthetic oligonucleotide
gaaattaatacgactcactatagggatgaataaaatcagttaatgagactgagttttagagctatgctgttttg

SEQ ID NO: 1535 - DNA, 74 bp, Artificial Sequence
  Description of Artificial Sequence: Synthetic oligonucleotide
gaaattaatacgactcactatagggatgaatagtggaaaaatcatccaggaggttttagagctatgctgttttg

SEQ ID NO: 1536 - DNA, 74 bp, Artificial Sequence
  Description of Artificial Sequence: Synthetic oligonucleotide
gaaattaatacgactcactatagggatgaatagctttgcccagcaacagagggttttagagctatgctgttttg

SEQ ID NO: 1537 - DNA, 74 bp, Artificial Sequence
  Description of Artificial Sequence: Synthetic oligonucleotide
gaaattaatacgactcactatagggatgaataaaaatgtagtggaagtaggagttttagagctatgctgttttg

SEQ ID NO: 1538 - DNA, 74 bp, Artificial Sequence
  Description of Artificial Sequence: Synthetic oligonucleotide
gaaattaatacgactcactatagggatgaataatggtttggggttatgaccagttttagagctatgctgttttg

SEQ ID NO: 1539 - DNA, 74 bp, Artificial Sequence
  Description of Artificial Sequence: Synthetic oligonucleotide
gaaattaatacgactcactatagggatgaatatagaattctgccttggggccgttttagagctatgctgttttg

SEQ ID NO: 1540 - DNA, 74 bp, Artificial Sequence
  Description of Artificial Sequence: Synthetic oligonucleotide
gaaattaatacgactcactatagggatgaataatgtctccaccatctcctgcgttttagagctatgctgttttg

SEQ ID NO: 1541 - DNA, 74 bp, Artificial Sequence
  Description of Artificial Sequence: Synthetic oligonucleotide
gaaattaatacgactcactatagggatgaatactttactggtttctatacacgttttagagctatgctgttttg

SEQ ID NO: 1542 - DNA, 74 bp, Artificial Sequence
  Description of Artificial Sequence: Synthetic oligonucleotide
gaaattaatacgactcactatagggatgaatagagctggctggaggaggacggttttagagctatgctgttttg

SEQ ID NO: 1543 - DNA, 74 bp, Artificial Sequence
  Description of Artificial Sequence: Synthetic oligonucleotide
gaaattaatacgactcactatagggatgaataggatcctggcaggaaacagagttttagagctatgctgttttg

SEQ ID NO: 1544 - DNA, 74 bp, Artificial Sequence
  Description of Artificial Sequence: Synthetic oligonucleotide
gaaattaatacgactcactatagggatgaatactaatctctgagttgccaaggttttagagctatgctgttttg

SEQ ID NO: 1545 - DNA, 74 bp, Artificial Sequence
  Description of Artificial Sequence: Synthetic oligonucleotide
gaaattaatacgactcactatagggatgaatacttgaaggacagacccgtccgttttagagctatgctgttttg

SEQ ID NO: 1546 - DNA, 74 bp, Artificial Sequence
  Description of Artificial Sequence: Synthetic oligonucleotide
gaaattaatacgactcactatagggatgaatagggcttggcacacgtcctcagttttagagctatgctgttttg

SEQ ID NO: 1547 - DNA, 74 bp, Artificial Sequence
  Description of Artificial Sequence: Synthetic oligonucleotide
gaaattaatacgactcactatagggatgaatactggcttccccagagcacaggttttagagctatgctgttttg

SEQ ID NO: 1548 - DNA, 74 bp, Artificial Sequence
  Description of Artificial Sequence: Synthetic oligonucleotide
gaaattaatacgactcactatagggatgaatagaaggagcgtcctgaagagagttttagagctatgctgttttg

SEQ ID NO: 1549 - DNA, 74 bp, Artificial Sequence
  Description of Artificial Sequence: Synthetic oligonucleotide
gaaattaatacgactcactatagggatgaatagaggatcgcttgagcccagggttttagagctatgctgttttg

SEQ ID NO: 1550 - DNA, 74 bp, Artificial Sequence
  Description of Artificial Sequence: Synthetic oligonucleotide
gaaattaatacgactcactatagggatgaatagggagatcccatcagagcaggttttagagctatgctgttttg

SEQ ID NO: 1551 - DNA, 74 bp, Artificial Sequence
  Description of Artificial Sequence: Synthetic oligonucleotide
gaaattaatacgactcactatagggatgaatacttctgacagttcttcagaggttttagagctatgctgttttg

SEQ ID NO: 1552 - DNA, 74 bp, Artificial Sequence
  Description of Artificial Sequence: Synthetic oligonucleotide
gaaattaatacgactcactatagggatgaatacagtgggaatccttgagcaggttttagagctatgctgttttg

SEQ ID NO: 1553 - DNA, 74 bp, Artificial Sequence
  Description of Artificial Sequence: Synthetic oligonucleotide
gaaattaatacgactcactatagggatgaataccacagaaagaagattcccagttttagagctatgctgttttg

SEQ ID NO: 1554 - DNA, 74 bp, Artificial Sequence
  Description of Artificial Sequence: Synthetic oligonucleotide
gaaattaatacgactcactatagggatgaatagggccatgggggagtggcaagttttagagctatgctgttttg

SEQ ID NO: 1555 - DNA, 74 bp, Artificial Sequence
  Description of Artificial Sequence: Synthetic oligonucleotide
gaaattaatacgactcactatagggatgaatagaaacctctaaccctgaccagttttagagctatgctgttttg

SEQ ID NO: 1556 - DNA, 74 bp, Artificial Sequence
  Description of Artificial Sequence: Synthetic oligonucleotide
gaaattaatacgactcactatagggatgaataatgctcagataacctcctccgttttagagctatgctgttttg

SEQ ID NO: 1557 - DNA, 74 bp, Artificial Sequence
  Description of Artificial Sequence: Synthetic oligonucleotide
gaaattaatacgactcactatagggatgaatacattgaaggcttgggtggaggttttagagctatgctgttttg

SEQ ID NO: 1558 - DNA, 74 bp, Artificial Sequence
  Description of Artificial Sequence: Synthetic oligonucleotide
gaaattaatacgactcactatagggatgaatagggaacccagaggtgtccaagttttagagctatgctgttttg

SEQ ID NO: 1559 - DNA, 74 bp, Artificial Sequence
  Description of Artificial Sequence: Synthetic oligonucleotide
gaaattaatacgactcactatagggatgaataggatcattatcccatgagacgttttagagctatgctgttttg

SEQ ID NO: 1560 - DNA, 74 bp, Artificial Sequence
  Description of Artificial Sequence: Synthetic oligonucleotide
gaaattaatacgactcactatagggatgaatagggcatcttggacaaaagaagttttagagctatgctgttttg

SEQ ID NO: 1561 - DNA, 74 bp, Artificial Sequence
  Description of Artificial Sequence: Synthetic oligonucleotide
gaaattaatacgactcactatagggatgaatatctattctgccaagcagaaggttttagagctatgctgttttg

SEQ ID NO: 1562 - DNA, 74 bp, Artificial Sequence
  Description of Artificial Sequence: Synthetic oligonucleotide
gaaattaatacgactcactatagggatgaatagggcgtgaggggcccaggaagttttagagctatgctgttttg

SEQ ID NO: 1563 - DNA, 74 bp, Artificial Sequence
  Description of Artificial Sequence: Synthetic oligonucleotide
gaaattaatacgactcactatagggatgaatatgggcaggcctgtgtccacagttttagagctatgctgttttg

SEQ ID NO: 1564 - DNA, 74 bp, Artificial Sequence
  Description of Artificial Sequence: Synthetic oligonucleotide
gaaattaatacgactcactatagggatgaatatgaattcattgctgggctccgttttagagctatgctgttttg

SEQ ID NO: 1565 - DNA, 74 bp, Artificial Sequence
  Description of Artificial Sequence: Synthetic oligonucleotide
gaaattaatacgactcactatagggatgaatactttgcatctggcatggggcgttttagagctatgctgttttg

SEQ ID NO: 1566 - DNA, 74 bp, Artificial Sequence
  Description of Artificial Sequence: Synthetic oligonucleotide
gaaattaatacgactcactatagggatgaatagtagtttcccagggtgagaagttttagagctatgctgttttg

SEQ ID NO: 1567 - DNA, 74 bp, Artificial Sequence
  Description of Artificial Sequence: Synthetic oligonucleotide
gaaattaatacgactcactatagggatgaataggtcttggcaccagggctgcgttttagagctatgctgttttg

SEQ ID NO: 1568 - DNA, 74 bp, Artificial Sequence
  Description of Artificial Sequence: Synthetic oligonucleotide
gaaattaatacgactcactatagggatgaatatgagagtctgctctatgaaagttttagagctatgctgttttg

SEQ ID NO: 1569 - DNA, 74 bp, Artificial Sequence
  Description of Artificial Sequence: Synthetic oligonucleotide
gaaattaatacgactcactatagggatgaatagagcttttggggatgagaaggttttagagctatgctgttttg

SEQ ID NO: 1570 - DNA, 74 bp, Artificial Sequence
  Description of Artificial Sequence: Synthetic oligonucleotide
gaaattaatacgactcactatagggatgaatacattttcccctctgtaacaggttttagagctatgctgttttg

SEQ ID NO: 1571 - DNA, 74 bp, Artificial Sequence
  Description of Artificial Sequence: Synthetic oligonucleotide
gaaattaatacgactcactatagggatgaatagagatccttcttctcaaggcgttttagagctatgctgttttg

SEQ ID NO: 1572 - DNA, 74 bp, Artificial Sequence
  Description of Artificial Sequence: Synthetic oligonucleotide
gaaattaatacgactcactatagggatgaatacagcgccccggggccccaccgttttagagctatgctgttttg

SEQ ID NO: 1573 - DNA, 74 bp, Artificial Sequence
  Description of Artificial Sequence: Synthetic oligonucleotide
gaaattaatacgactcactatagggatgaataaattgttgtggcggcggcgggttttagagctatgctgttttg

SEQ ID NO: 1574 - DNA, 74 bp, Artificial Sequence
  Description of Artificial Sequence: Synthetic oligonucleotide
gaaattaatacgactcactatagggatgaatatatgtgctgggcacagcaccgttttagagctatgctgttttg

SEQ ID NO: 1575 - DNA, 74 bp, Artificial Sequence
  Description of Artificial Sequence: Synthetic oligonucleotide
gaaattaatacgactcactatagggatgaatacaaggtcatacagttggtaagttttagagctatgctgttttg

SEQ ID NO: 1576 - DNA, 74 bp, Artificial Sequence
  Description of Artificial Sequence: Synthetic oligonucleotide
gaaattaatacgactcactatagggatgaatatagggttagtatctcaaggggttttagagctatgctgttttg

SEQ ID NO: 1577 - DNA, 74 bp, Artificial Sequence
  Description of Artificial Sequence: Synthetic oligonucleotide
gaaattaatacgactcactatagggatgaatagtgagtgaaatatatggggcgttttagagctatgctgttttg

SEQ ID NO: 1578 - DNA, 74 bp, Artificial Sequence
  Description of Artificial Sequence: Synthetic oligonucleotide
gaaattaatacgactcactatagggatgaatacagcatgtgcaatgacctgggttttagagctatgctgttttg

SEQ ID NO: 1579 - DNA, 74 bp, Artificial Sequence
  Description of Artificial Sequence: Synthetic oligonucleotide
gaaattaatacgactcactatagggatgaatacttaacctggccaacacacagttttagagctatgctgttttg

SEQ ID NO: 1580 - DNA, 74 bp, Artificial Sequence
  Description of Artificial Sequence: Synthetic oligonucleotide
gaaattaatacgactcactatagggatgaatatgacctgaactgcgacagccgttttagagctatgctgttttg

SEQ ID NO: 1581 - DNA, 74 bp, Artificial Sequence
  Description of Artificial Sequence: Synthetic oligonucleotide
gaaattaatacgactcactatagggatgaatagtgatatagcagaatagagggttttagagctatgctgttttg

SEQ ID NO: 1582 - DNA, 74 bp, Artificial Sequence
  Description of Artificial Sequence: Synthetic oligonucleotide
gaaattaatacgactcactatagggatgaatacagcggcagtggcgaggaacgttttagagctatgctgttttg

SEQ ID NO: 1583 - DNA, 74 bp, Artificial Sequence
  Description of Artificial Sequence: Synthetic oligonucleotide
gaaattaatacgactcactatagggatgaatagatggtaggggttgagggccgttttagagctatgctgttttg

SEQ ID NO: 1584 - DNA, 74 bp, Artificial Sequence
  Description of Artificial Sequence: Synthetic oligonucleotide
gaaattaatacgactcactatagggatgaatagctgggactctctccccagggttttagagctatgctgttttg

SEQ ID NO: 1585 - DNA, 74 bp, Artificial Sequence
  Description of Artificial Sequence: Synthetic oligonucleotide
gaaattaatacgactcactatagggatgaataaagttctccaggcactcacagttttagagctatgctgttttg

SEQ ID NO: 1586 - DNA, 74 bp, Artificial Sequence
  Description of Artificial Sequence: Synthetic oligonucleotide
gaaattaatacgactcactatagggatgaatacatgagcctcatcgacgtgggttttagagctatgctgttttg

SEQ ID NO: 1587 - DNA, 74 bp, Artificial Sequence
  Description of Artificial Sequence: Synthetic oligonucleotide
gaaattaatacgactcactatagggatgaatacttgctgggcagctcggagagttttagagctatgctgttttg

SEQ ID NO: 1588 - DNA, 74 bp, Artificial Sequence
  Description of Artificial Sequence: Synthetic oligonucleotide
gaaattaatacgactcactatagggatgaatatcgaggagatgaggttctgggttttagagctatgctgttttg

SEQ ID NO: 1589 - DNA, 74 bp, Artificial Sequence
  Description of Artificial Sequence: Synthetic oligonucleotide
gaaattaatacgactcactatagggatgaatattttgctcgggcagcagcaggttttagagctatgctgttttg

SEQ ID NO: 1590 - DNA, 74 bp, Artificial Sequence
  Description of Artificial Sequence: Synthetic oligonucleotide
gaaattaatacgactcactatagggatgaatatctccaagcccccaccatccgttttagagctatgctgttttg

SEQ ID NO: 1591 - DNA, 74 bp, Artificial Sequence
  Description of Artificial Sequence: Synthetic oligonucleotide
gaaattaatacgactcactatagggatgaatacagcaagtcagtggcaaagcgttttagagctatgctgttttg

SEQ ID NO: 1592 - DNA, 74 bp, Artificial Sequence
  Description of Artificial Sequence: Synthetic oligonucleotide
gaaattaatacgactcactatagggatgaatacttgggtgaaaggctaggccgttttagagctatgctgttttg

SEQ ID NO: 1593 - DNA, 74 bp, Artificial Sequence
  Description of Artificial Sequence: Synthetic oligonucleotide
gaaattaatacgactcactatagggatgaatagtgtgtgtgtgtgtgtgtaagttttagagctatgctgttttg

SEQ ID NO: 1594 - DNA, 74 bp, Artificial Sequence
  Description of Artificial Sequence: Synthetic oligonucleotide
gaaattaatacgactcactatagggatgaatatttaatttatgtctggagccgttttagagctatgctgttttg

SEQ ID NO: 1595 - DNA, 74 bp, Artificial Sequence
  Description of Artificial Sequence: Synthetic oligonucleotide
gaaattaatacgactcactatagggatgaatacttcttggtcctggctcccagttttagagctatgctgttttg

SEQ ID NO: 1596 - DNA, 74 bp, Artificial Sequence
  Description of Artificial Sequence: Synthetic oligonucleotide
gaaattaatacgactcactatagggatgaatatgtgggtgtggggtctgcccgttttagagctatgctgttttg

SEQ ID NO: 1597 - DNA, 74 bp, Artificial Sequence
  Description of Artificial Sequence: Synthetic oligonucleotide
gaaattaatacgactcactatagggatgaatagcaggagaaatggatgctgggttttagagctatgctgttttg

SEQ ID NO: 1598 - DNA, 74 bp, Artificial Sequence
  Description of Artificial Sequence: Synthetic oligonucleotide
gaaattaatacgactcactatagggatgaatacgagcaggcccaggaggagcgttttagagctatgctgttttg

SEQ ID NO: 1599 - DNA, 74 bp, Artificial Sequence
  Description of Artificial Sequence: Synthetic oligonucleotide
gaaattaatacgactcactatagggatgaatagggccctcctgggaggacaggttttagagctatgctgttttg

SEQ ID NO: 1600 - DNA, 74 bp, Artificial Sequence
  Description of Artificial Sequence: Synthetic oligonucleotide
gaaattaatacgactcactatagggatgaatagctccgtgggcagatccggggttttagagctatgctgttttg

SEQ ID NO: 1601 - DNA, 74 bp, Artificial Sequence
  Description of Artificial Sequence: Synthetic oligonucleotide
gaaattaatacgactcactatagggatgaatagcatgagaaggaggtgctgggttttagagctatgctgttttg

SEQ ID NO: 1602 - DNA, 74 bp, Artificial Sequence
  Description of Artificial Sequence: Synthetic oligonucleotide
gaaattaatacgactcactatagggatgaatacatgctggatgagctagcaagttttagagctatgctgttttg

SEQ ID NO: 1603 - DNA, 74 bp, Artificial Sequence
  Description of Artificial Sequence: Synthetic oligonucleotide
gaaattaatacgactcactatagggatgaatagttccttgggcatgggaagagttttagagctatgctgttttg

SEQ ID NO: 1604 - DNA, 74 bp, Artificial Sequence
  Description of Artificial Sequence: Synthetic oligonucleotide
gaaattaatacgactcactatagggatgaataagtgaccagttctataaggagttttagagctatgctgttttg

SEQ ID NO: 1605 - DNA, 74 bp, Artificial Sequence
  Description of Artificial Sequence: Synthetic oligonucleotide
gaaattaatacgactcactatagggatgaatatctgagagttcaccaggaccgttttagagctatgctgttttg

SEQ ID NO: 1606 - DNA, 74 bp, Artificial Sequence
  Description of Artificial Sequence: Synthetic oligonucleotide
gaaattaatacgactcactatagggatgaatacatgagtgtaagatctcagggttttagagctatgctgttttg

SEQ ID NO: 1607 - DNA, 74 bp, Artificial Sequence
  Description of Artificial Sequence: Synthetic oligonucleotide
gaaattaatacgactcactatagggatgaataggaggcaggagggcaggggagttttagagctatgctgttttg

SEQ ID NO: 1608 - DNA, 74 bp, Artificial Sequence
  Description of Artificial Sequence: Synthetic oligonucleotide
gaaattaatacgactcactatagggatgaatagagctggaatgccagaaggcgttttagagctatgctgttttg

SEQ ID NO: 1609 - DNA, 74 bp, Artificial Sequence
  Description of Artificial Sequence: Synthetic oligonucleotide
gaaattaatacgactcactatagggatgaataggggcttcaaggattgagaagttttagagctatgctgttttg

SEQ ID NO: 1610 - DNA, 74 bp, Artificial Sequence
  Description of Artificial Sequence: Synthetic oligonucleotide
gaaattaatacgactcactatagggatgaatagtggaactttggagagcagcgttttagagctatgctgttttg

SEQ ID NO: 1611 - DNA, 74 bp, Artificial Sequence
  Description of Artificial Sequence: Synthetic oligonucleotide
gaaattaatacgactcactatagggatgaatagcagggactctggaaccagagttttagagctatgctgttttg

SEQ ID NO: 1612 - DNA, 74 bp, Artificial Sequence
  Description of Artificial Sequence: Synthetic oligonucleotide
gaaattaatacgactcactatagggatgaatattgtcattgttcctgggagggttttagagctatgctgttttg

SEQ ID NO: 1613 - DNA, 74 bp, Artificial Sequence
  Description of Artificial Sequence: Synthetic oligonucleotide
gaaattaatacgactcactatagggatgaataagggcagaaccattagcggggttttagagctatgctgttttg

SEQ ID NO: 1614 - DNA, 74 bp, Artificial Sequence
  Description of Artificial Sequence: Synthetic oligonucleotide
gaaattaatacgactcactatagggatgaataagacttttgggcccgtgcaggttttagagctatgctgttttg

SEQ ID NO: 1615 - DNA, 74 bp, Artificial Sequence
  Description of Artificial Sequence: Synthetic oligonucleotide
gaaattaatacgactcactatagggatgaataagggaaactgaggctcggaggttttagagctatgctgttttg

SEQ ID NO: 1616 - DNA, 74 bp, Artificial Sequence
  Description of Artificial Sequence: Synthetic oligonucleotide
gaaattaatacgactcactatagggatgaatagcttgggccccccaaagtgcgttttagagctatgctgttttg

SEQ ID NO: 1617 - DNA, 74 bp, Artificial Sequence
  Description of Artificial Sequence: Synthetic oligonucleotide
gaaattaatacgactcactatagggatgaataatggaagtgatatcccctcagttttagagctatgctgttttg

SEQ ID NO: 1618 - DNA, 74 bp, Artificial Sequence
  Description of Artificial Sequence: Synthetic oligonucleotide
gaaattaatacgactcactatagggatgaatataatgtccaacctttaccgcgttttagagctatgctgttttg

SEQ ID NO: 1619 - DNA, 74 bp, Artificial Sequence
  Description of Artificial Sequence: Synthetic oligonucleotide
gaaattaatacgactcactatagggatgaatatattttcctaatttgtaaaagttttagagctatgctgttttg

SEQ ID NO: 1620 - DNA, 74 bp, Artificial Sequence
  Description of Artificial Sequence: Synthetic oligonucleotide
gaaattaatacgactcactatagggatgaataacatgggttcaggccagaaggttttagagctatgctgttttg

SEQ ID NO: 1621 - DNA, 74 bp, Artificial Sequence
  Description of Artificial Sequence: Synthetic oligonucleotide
gaaattaatacgactcactatagggatgaatagcaacccccgctcccgcccagttttagagctatgctgttttg

SEQ ID NO: 1622 - DNA, 74 bp, Artificial Sequence
  Description of Artificial Sequence: Synthetic oligonucleotide
gaaattaatacgactcactatagggatgaatacaaggccagcaggcaggtgggttttagagctatgctgttttg

SEQ ID NO: 1623 - DNA, 74 bp, Artificial Sequence
  Description of Artificial Sequence: Synthetic oligonucleotide
gaaattaatacgactcactatagggatgaataagatgaggacatggtggaaggttttagagctatgctgttttg

SEQ ID NO: 1624 - DNA, 74 bp, Artificial Sequence
  Description of Artificial Sequence: Synthetic oligonucleotide
gaaattaatacgactcactatagggatgaatatcagatcatcgcccctgtacgttttagagctatgctgttttg

SEQ ID NO: 1625 - DNA, 74 bp, Artificial Sequence
  Description of Artificial Sequence: Synthetic oligonucleotide
gaaattaatacgactcactatagggatgaatagttttcttatctgtttaaaagttttagagctatgctgttttg

SEQ ID NO: 1626 - DNA, 74 bp, Artificial Sequence
  Description of Artificial Sequence: Synthetic oligonucleotide
gaaattaatacgactcactatagggatgaatatgtaggaacacaaacaacaagttttagagctatgctgttttg

SEQ ID NO: 1627 - DNA, 74 bp, Artificial Sequence
  Description of Artificial Sequence: Synthetic oligonucleotide
gaaattaatacgactcactatagggatgaatagaggcaggggaaggcagtaagttttagagctatgctgttttg

SEQ ID NO: 1628 - DNA, 74 bp, Artificial Sequence
  Description of Artificial Sequence: Synthetic oligonucleotide
gaaattaatacgactcactatagggatgaatagggttgggacatgggtaggagttttagagctatgctgttttg

SEQ ID NO: 1629 - DNA, 74 bp, Artificial Sequence
  Description of Artificial Sequence: Synthetic oligonucleotide
gaaattaatacgactcactatagggatgaatatgggagtcccagacaggtaagttttagagctatgctgttttg

SEQ ID NO: 1630 - DNA, 74 bp, Artificial Sequence
  Description of Artificial Sequence: Synthetic oligonucleotide
gaaattaatacgactcactatagggatgaatagcagaaggccttggctcagggttttagagctatgctgttttg

SEQ ID NO: 1631 - DNA, 74 bp, Artificial Sequence
  Description of Artificial Sequence: Synthetic oligonucleotide
gaaattaatacgactcactatagggatgaatattgagaaaagccctccaccagttttagagctatgctgttttg

SEQ ID NO: 1632 - DNA, 74 bp, Artificial Sequence
  Description of Artificial Sequence: Synthetic oligonucleotide
gaaattaatacgactcactatagggatgaatagtaagagattcagagaaaccgttttagagctatgctgttttg

SEQ ID NO: 1633 - DNA, 74 bp, Artificial Sequence
  Description of Artificial Sequence: Synthetic oligonucleotide
gaaattaatacgactcactatagggatgaatagcaaaatgacagttctctcggttttagagctatgctgttttg

SEQ ID NO: 1634 - DNA, 74 bp, Artificial Sequence
  Description of Artificial Sequence: Synthetic oligonucleotide
gaaattaatacgactcactatagggatgaatacaaagaactcagcctaataggttttagagctatgctgttttg

SEQ ID NO: 1635 - DNA, 74 bp, Artificial Sequence
  Description of Artificial Sequence: Synthetic oligonucleotide
gaaattaatacgactcactatagggatgaatatagcatgagagcccaggggagttttagagctatgctgttttg

SEQ ID NO: 1636 - DNA, 74 bp, Artificial Sequence
  Description of Artificial Sequence: Synthetic oligonucleotide
gaaattaatacgactcactatagggatgaataggtttccagccggggtgcaggttttagagctatgctgttttg

SEQ ID NO: 1637 - DNA, 74 bp, Artificial Sequence
  Description of Artificial Sequence: Synthetic oligonucleotide
gaaattaatacgactcactatagggatgaatatagcagaggtgctgaaataggttttagagctatgctgttttg

SEQ ID NO: 1638 - DNA, 74 bp, Artificial Sequence
  Description of Artificial Sequence: Synthetic oligonucleotide
gaaattaatacgactcactatagggatgaatacagagttctttcctcacaaggttttagagctatgctgttttg

SEQ ID NO: 1639 - DNA, 74 bp, Artificial Sequence
  Description of Artificial Sequence: Synthetic oligonucleotide
gaaattaatacgactcactatagggatgaatacgaaagagagacaactaacagttttagagctatgctgttttg

SEQ ID NO: 1640 - DNA, 74 bp, Artificial Sequence
  Description of Artificial Sequence: Synthetic oligonucleotide
gaaattaatacgactcactatagggatgaatagtgcagatgatttgtagggggttttagagctatgctgttttg

SEQ ID NO: 1641 - DNA, 74 bp, Artificial Sequence
  Description of Artificial Sequence: Synthetic oligonucleotide
gaaattaatacgactcactatagggatgaataacagagtgatcagtgggagcgttttagagctatgctgttttg

SEQ ID NO: 1642 - DNA, 74 bp, Artificial Sequence
  Description of Artificial Sequence: Synthetic oligonucleotide
gaaattaatacgactcactatagggatgaatacaaaaacaccaaaagggagggttttagagctatgctgttttg

SEQ ID NO: 1643 - DNA, 74 bp, Artificial Sequence
  Description of Artificial Sequence: Synthetic oligonucleotide
gaaattaatacgactcactatagggatgaataatgagttataaagaatctcagttttagagctatgctgttttg

SEQ ID NO: 1644 - DNA, 74 bp, Artificial Sequence
  Description of Artificial Sequence: Synthetic oligonucleotide
gaaattaatacgactcactatagggatgaatattgtctgatccagaatagaagttttagagctatgctgttttg

SEQ ID NO: 1645 - DNA, 74 bp, Artificial Sequence
  Description of Artificial Sequence: Synthetic oligonucleotide
gaaattaatacgactcactatagggatgaatataagtcagaatgacctgtgggttttagagctatgctgttttg

SEQ ID NO: 1646 - DNA, 74 bp, Artificial Sequence
  Description of Artificial Sequence: Synthetic oligonucleotide
gaaattaatacgactcactatagggatgaatagctgatggacttctttgtccgttttagagctatgctgttttg

SEQ ID NO: 1647 - DNA, 74 bp, Artificial Sequence
  Description of Artificial Sequence: Synthetic oligonucleotide
gaaattaatacgactcactatagggatgaatagatgttctttggggaccagggttttagagctatgctgttttg

SEQ ID NO: 1648 - DNA, 74 bp, Artificial Sequence
  Description of Artificial Sequence: Synthetic oligonucleotide
gaaattaatacgactcactatagggatgaataattgccatcgttttggagcagttttagagctatgctgttttg

SEQ ID NO: 1649 - DNA, 74 bp, Artificial Sequence
  Description of Artificial Sequence: Synthetic oligonucleotide
gaaattaatacgactcactatagggatgaataccagaggagagacaaaggaagttttagagctatgctgttttg

SEQ ID NO: 1650 - DNA, 74 bp, Artificial Sequence
  Description of Artificial Sequence: Synthetic oligonucleotide
gaaattaatacgactcactatagggatgaatatgttggtgttgaagaggagagttttagagctatgctgttttg

SEQ ID NO: 1651 - DNA, 74 bp, Artificial Sequence
  Description of Artificial Sequence: Synthetic oligonucleotide
gaaattaatacgactcactatagggatgaatatgggaaaggggatgagcagcgttttagagctatgctgttttg

SEQ ID NO: 1652 - DNA, 74 bp, Artificial Sequence
  Description of Artificial Sequence: Synthetic oligonucleotide
gaaattaatacgactcactatagggatgaataaagctgcattcagttaagccgttttagagctatgctgttttg

SEQ ID NO: 1653 - DNA, 74 bp, Artificial Sequence
  Description of Artificial Sequence: Synthetic oligonucleotide
gaaattaatacgactcactatagggatgaatagtagtaaatagttcacagacgttttagagctatgctgttttg

SEQ ID NO: 1654 - DNA, 74 bp, Artificial Sequence
  Description of Artificial Sequence: Synthetic oligonucleotide
gaaattaatacgactcactatagggatgaatattttctgtggcaaagaaccagttttagagctatgctgttttg

SEQ ID NO: 1655 - DNA, 74 bp, Artificial Sequence
  Description of Artificial Sequence: Synthetic oligonucleotide
gaaattaatacgactcactatagggatgaatatcaccagagagtgagagggagttttagagctatgctgttttg

SEQ ID NO: 1656 - DNA, 74 bp, Artificial Sequence
  Description of Artificial Sequence: Synthetic oligonucleotide
gaaattaatacgactcactatagggatgaatatgatgaagaggagtaggaaggttttagagctatgctgttttg

SEQ ID NO: 1657 - DNA, 74 bp, Artificial Sequence
  Description of Artificial Sequence: Synthetic oligonucleotide
gaaattaatacgactcactatagggatgaatagatgttgtcaggactcgggagttttagagctatgctgttttg

SEQ ID NO: 1658 - DNA, 74 bp, Artificial Sequence
  Description of Artificial Sequence: Synthetic oligonucleotide
gaaattaatacgactcactatagggatgaataggtagctgaaatgggagtaggttttagagctatgctgttttg

SEQ ID NO: 1659 - DNA, 74 bp, Artificial Sequence
  Description of Artificial Sequence: Synthetic oligonucleotide
gaaattaatacgactcactatagggatgaataaaagccagagtgctttacaggttttagagctatgctgttttg

SEQ ID NO: 1660 - DNA, 74 bp, Artificial Sequence
  Description of Artificial Sequence: Synthetic oligonucleotide
gaaattaatacgactcactatagggatgaataaaaagagttcatcgggaaaagttttagagctatgctgttttg

SEQ ID NO: 1661 - DNA, 74 bp, Artificial Sequence
  Description of Artificial Sequence: Synthetic oligonucleotide
gaaattaatacgactcactatagggatgaataatagagggcacatggagcccgttttagagctatgctgttttg

SEQ ID NO: 1662 - DNA, 74 bp, Artificial Sequence
  Description of Artificial Sequence: Synthetic oligonucleotide
gaaattaatacgactcactatagggatgaataatgtttaggtgacagacagagttttagagctatgctgttttg

SEQ ID NO: 1663 - DNA, 74 bp, Artificial Sequence
  Description of Artificial Sequence: Synthetic oligonucleotide
gaaattaatacgactcactatagggatgaatatgagttatccctatacccaagttttagagctatgctgttttg

SEQ ID NO: 1664 - DNA, 74 bp, Artificial Sequence
  Description of Artificial Sequence: Synthetic oligonucleotide
gaaattaatacgactcactatagggatgaataggggcactgggcccaggtgcgttttagagctatgctgttttg

SEQ ID NO: 1665 - DNA, 74 bp, Artificial Sequence
  Description of Artificial Sequence: Synthetic oligonucleotide
gaaattaatacgactcactatagggatgaatatggaacaatggagtgtgcgcgttttagagctatgctgttttg

SEQ ID NO: 1666 - DNA, 74 bp, Artificial Sequence
  Description of Artificial Sequence: Synthetic oligonucleotide
gaaattaatacgactcactatagggatgaatatgaggtttaatgttctgtgggttttagagctatgctgttttg

SEQ ID NO: 1667 - DNA, 74 bp, Artificial Sequence
  Description of Artificial Sequence: Synthetic oligonucleotide
gaaattaatacgactcactatagggatgaatagtatggcaccgagagtccgcgttttagagctatgctgttttg

SEQ ID NO: 1668 - DNA, 74 bp, Artificial Sequence
  Description of Artificial Sequence: Synthetic oligonucleotide
gaaattaatacgactcactatagggatgaatacagcagggaaaaggaagagcgttttagagctatgctgttttg

SEQ ID NO: 1669 - DNA, 74 bp, Artificial Sequence
  Description of Artificial Sequence: Synthetic oligonucleotide
gaaattaatacgactcactatagggatgaataatgtagtggggacagacagcgttttagagctatgctgttttg

SEQ ID NO: 1670 - DNA, 74 bp, Artificial Sequence
  Description of Artificial Sequence: Synthetic oligonucleotide
gaaattaatacgactcactatagggatgaatattaccacccttggtcccagggttttagagctatgctgttttg

SEQ ID NO: 1671 - DNA, 74 bp, Artificial Sequence
  Description of Artificial Sequence: Synthetic oligonucleotide
gaaattaatacgactcactatagggatgaataagtatggttcccagaccagcgttttagagctatgctgttttg

SEQ ID NO: 1672 - DNA, 74 bp, Artificial Sequence
  Description of Artificial Sequence: Synthetic oligonucleotide
gaaattaatacgactcactatagggatgaatatattggaacagagtgagtgagttttagagctatgctgttttg

SEQ ID NO: 1673 - DNA, 74 bp, Artificial Sequence
  Description of Artificial Sequence: Synthetic oligonucleotide
gaaattaatacgactcactatagggatgaatagggaagagtgtttcaagtaggttttagagctatgctgttttg

SEQ ID NO: 1674 - DNA, 74 bp, Artificial Sequence
  Description of Artificial Sequence: Synthetic oligonucleotide
gaaattaatacgactcactatagggatgaatattatacaggatgattacagagttttagagctatgctgttttg

SEQ ID NO: 1675 - DNA, 74 bp, Artificial Sequence
  Description of Artificial Sequence: Synthetic oligonucleotide
gaaattaatacgactcactatagggatgaatattgtctggtctcctccagaggttttagagctatgctgttttg

SEQ ID NO: 1676 - DNA, 74 bp, Artificial Sequence
  Description of Artificial Sequence: Synthetic oligonucleotide
gaaattaatacgactcactatagggatgaatacttgagggggctttgtacacgttttagagctatgctgttttg

SEQ ID NO: 1677 - DNA, 74 bp, Artificial Sequence
  Description of Artificial Sequence: Synthetic oligonucleotide
gaaattaatacgactcactatagggatgaatatgtcacccagaattccggaggttttagagctatgctgttttg

SEQ ID NO: 1678 - DNA, 74 bp, Artificial Sequence
  Description of Artificial Sequence: Synthetic oligonucleotide
gaaattaatacgactcactatagggatgaatagaatagatgctgggtaaaacgttttagagctatgctgttttg

SEQ ID NO: 1679 - DNA, 74 bp, Artificial Sequence
  Description of Artificial Sequence: Synthetic oligonucleotide
gaaattaatacgactcactatagggatgaatacttgtctgtcttgttcgtgagttttagagctatgctgttttg

SEQ ID NO: 1680 - DNA, 74 bp, Artificial Sequence
  Description of Artificial Sequence: Synthetic oligonucleotide
gaaattaatacgactcactatagggatgaatatgatattgagagtgatggaagttttagagctatgctgttttg

SEQ ID NO: 1681 - DNA, 74 bp, Artificial Sequence
  Description of Artificial Sequence: Synthetic oligonucleotide
gaaattaatacgactcactatagggatgaatattgcagcccaaagcatgagggttttagagctatgctgttttg

SEQ ID NO: 1682 - DNA, 74 bp, Artificial Sequence
  Description of Artificial Sequence: Synthetic oligonucleotide
gaaattaatacgactcactatagggatgaatagctgaggcgcttcgcagtccgttttagagctatgctgttttg

SEQ ID NO: 1683 - DNA, 74 bp, Artificial Sequence
  Description of Artificial Sequence: Synthetic oligonucleotide
gaaattaatacgactcactatagggatgaataaaggcgagcgaggttcccgggttttagagctatgctgttttg

SEQ ID NO: 1684 - DNA, 74 bp, Artificial Sequence
  Description of Artificial Sequence: Synthetic oligonucleotide
gaaattaatacgactcactatagggatgaatacgaggggaatgttgtggagggttttagagctatgctgttttg

SEQ ID NO: 1685 - DNA, 74 bp, Artificial Sequence
  Description of Artificial Sequence: Synthetic oligonucleotide
gaaattaatacgactcactatagggatgaataccacttgcccgttcgccggggttttagagctatgctgttttg

SEQ ID NO: 1686 - DNA, 74 bp, Artificial Sequence
  Description of Artificial Sequence: Synthetic oligonucleotide
gaaattaatacgactcactatagggatgaatatgtgcctcggacgtggcggcgttttagagctatgctgttttg

SEQ ID NO: 1687 - DNA, 74 bp, Artificial Sequence
  Description of Artificial Sequence: Synthetic oligonucleotide
gaaattaatacgactcactatagggatgaatatagcgccgccactctcaacagttttagagctatgctgttttg

SEQ ID NO: 1688 - DNA, 74 bp, Artificial Sequence
  Description of Artificial Sequence: Synthetic oligonucleotide
gaaattaatacgactcactatagggatgaatatgacgtcacccgggagccgggttttagagctatgctgttttg

SEQ ID NO: 1689 - DNA, 74 bp, Artificial Sequence
  Description of Artificial Sequence: Synthetic oligonucleotide
gaaattaatacgactcactatagggatgaatagtttcgggccccactcaaaagttttagagctatgctgttttg

SEQ ID NO: 1690 - DNA, 74 bp, Artificial Sequence
  Description of Artificial Sequence: Synthetic oligonucleotide
gaaattaatacgactcactatagggatgaataggaggagaaggctggggagggttttagagctatgctgttttg

SEQ ID NO: 1691 - DNA, 74 bp, Artificial Sequence
  Description of Artificial Sequence: Synthetic oligonucleotide
gaaattaatacgactcactatagggatgaatatgagtactccgcctctacccgttttagagctatgctgttttg

SEQ ID NO: 1692 - DNA, 74 bp, Artificial Sequence
  Description of Artificial Sequence: Synthetic oligonucleotide
gaaattaatacgactcactatagggatgaataattccctaagggtacacacagttttagagctatgctgttttg

SEQ ID NO: 1693 - DNA, 74 bp, Artificial Sequence
  Description of Artificial Sequence: Synthetic oligonucleotide
gaaattaatacgactcactatagggatgaatatctttgttcccacaccacacgttttagagctatgctgttttg

SEQ ID NO: 1694 - DNA, 74 bp, Artificial Sequence
  Description of Artificial Sequence: Synthetic oligonucleotide
gaaattaatacgactcactatagggatgaatagggaggaattttaggagtcggttttagagctatgctgttttg

SEQ ID NO: 1695 - DNA, 74 bp, Artificial Sequence
  Description of Artificial Sequence: Synthetic oligonucleotide
gaaattaatacgactcactatagggatgaatactgcctctggttcagaccccgttttagagctatgctgttttg

SEQ ID NO: 1696 - DNA, 74 bp, Artificial Sequence
  Description of Artificial Sequence: Synthetic oligonucleotide
gaaattaatacgactcactatagggatgaatatgggctgcatcctctgagacgttttagagctatgctgttttg

SEQ ID NO: 1697 - DNA, 74 bp, Artificial Sequence
  Description of Artificial Sequence: Synthetic oligonucleotide
gaaattaatacgactcactatagggatgaataactgttaaatggaggtgggagttttagagctatgctgttttg

SEQ ID NO: 1698 - DNA, 74 bp, Artificial Sequence
  Description of Artificial Sequence: Synthetic oligonucleotide
gaaattaatacgactcactatagggatgaatacattgaaatgccctgtcacggttttagagctatgctgttttg

SEQ ID NO: 1699 - DNA, 74 bp, Artificial Sequence
  Description of Artificial Sequence: Synthetic oligonucleotide
gaaattaatacgactcactatagggatgaataatgtgaagatacactgctgagttttagagctatgctgttttg

SEQ ID NO: 1700 - DNA, 74 bp, Artificial Sequence
  Description of Artificial Sequence: Synthetic oligonucleotide
gaaattaatacgactcactatagggatgaataatgctcaacttcaatagtgagttttagagctatgctgttttg

SEQ ID NO: 1701 - DNA, 74 bp, Artificial Sequence
  Description of Artificial Sequence: Synthetic oligonucleotide
gaaattaatacgactcactatagggatgaatactgtaagaaaaaataggcaagttttagagctatgctgttttg

SEQ ID NO: 1702 - DNA, 74 bp, Artificial Sequence
  Description of Artificial Sequence: Synthetic oligonucleotide
gaaattaatacgactcactatagggatgaatattgttgattttgtagagacagttttagagctatgctgttttg

SEQ ID NO: 1703 - DNA, 74 bp, Artificial Sequence
  Description of Artificial Sequence: Synthetic oligonucleotide
gaaattaatacgactcactatagggatgaataacaaaaaagaaatacaaagagttttagagctatgctgttttg

SEQ ID NO: 1704 - DNA, 74 bp, Artificial Sequence
  Description of Artificial Sequence: Synthetic oligonucleotide
gaaattaatacgactcactatagggatgaataatacaagtgactgagcatacgttttagagctatgctgttttg

SEQ ID NO: 1705 - DNA, 74 bp, Artificial Sequence
  Description of Artificial Sequence: Synthetic oligonucleotide
gaaattaatacgactcactatagggatgaatagcagtgtctgcagccaccacgttttagagctatgctgttttg

SEQ ID NO: 1706 - DNA, 74 bp, Artificial Sequence
  Description of Artificial Sequence: Synthetic oligonucleotide
gaaattaatacgactcactatagggatgaatataaattttatgggtacataggttttagagctatgctgttttg

SEQ ID NO: 1707 - DNA, 74 bp, Artificial Sequence
  Description of Artificial Sequence: Synthetic oligonucleotide
gaaattaatacgactcactatagggatgaatatctctttactttgaccctccgttttagagctatgctgttttg

SEQ ID NO: 1708 - DNA, 74 bp, Artificial Sequence
  Description of Artificial Sequence: Synthetic oligonucleotide
gaaattaatacgactcactatagggatgaatactgctcctattaacacaaccgttttagagctatgctgttttg

SEQ ID NO: 1709 - DNA, 74 bp, Artificial Sequence
  Description of Artificial Sequence: Synthetic oligonucleotide
gaaattaatacgactcactatagggatgaatacataaatgtatagacaatgggttttagagctatgctgttttg

SEQ ID NO: 1710 - DNA, 74 bp, Artificial Sequence
  Description of Artificial Sequence: Synthetic oligonucleotide
gaaattaatacgactcactatagggatgaatatggtaaatctaacctaatgcgttttagagctatgctgttttg

SEQ ID NO: 1711 - DNA, 74 bp, Artificial Sequence
  Description of Artificial Sequence: Synthetic oligonucleotide
gaaattaatacgactcactatagggatgaataacacaacagtcacagcaagggttttagagctatgctgttttg

SEQ ID NO: 1712 - DNA, 74 bp, Artificial Sequence
  Description of Artificial Sequence: Synthetic oligonucleotide
gaaattaatacgactcactatagggatgaatacaaaacctatcccacactcagttttagagctatgctgttttg

SEQ ID NO: 1713 - DNA, 74 bp, Artificial Sequence
  Description of Artificial Sequence: Synthetic oligonucleotide
gaaattaatacgactcactatagggatgaataccacccaccactatctggaggttttagagctatgctgttttg

SEQ ID NO: 1714 - DNA, 74 bp, Artificial Sequence
  Description of Artificial Sequence: Synthetic oligonucleotide
gaaattaatacgactcactatagggatgaatagaagtgactgcccacagcaagttttagagctatgctgttttg

SEQ ID NO: 1715 - DNA, 74 bp, Artificial Sequence
  Description of Artificial Sequence: Synthetic oligonucleotide
gaaattaatacgactcactatagggatgaataccaaaactgaagccctgacggttttagagctatgctgttttg

SEQ ID NO: 1716 - DNA, 74 bp, Artificial Sequence
  Description of Artificial Sequence: Synthetic oligonucleotide
gaaattaatacgactcactatagggatgaatacctggagcctctggaccaaagttttagagctatgctgttttg

SEQ ID NO: 1717 - DNA, 74 bp, Artificial Sequence
  Description of Artificial Sequence: Synthetic oligonucleotide
gaaattaatacgactcactatagggatgaataacagacactgggtgagctaagttttagagctatgctgttttg

SEQ ID NO: 1718 - DNA, 74 bp, Artificial Sequence
  Description of Artificial Sequence: Synthetic oligonucleotide
gaaattaatacgactcactatagggatgaatatcaagaggccatagctgcacgttttagagctatgctgttttg

SEQ ID NO: 1719 - DNA, 74 bp, Artificial Sequence
  Description of Artificial Sequence: Synthetic oligonucleotide
gaaattaatacgactcactatagggatgaataggatgacttgacaagactgggttttagagctatgctgttttg

SEQ ID NO: 1720 - DNA, 74 bp, Artificial Sequence
  Description of Artificial Sequence: Synthetic oligonucleotide
gaaattaatacgactcactatagggatgaataagtgtcaccacggtagggacgttttagagctatgctgttttg

SEQ ID NO: 1721 - DNA, 74 bp, Artificial Sequence
  Description of Artificial Sequence: Synthetic oligonucleotide
gaaattaatacgactcactatagggatgaatacaggatgccacctggagaaggttttagagctatgctgttttg

SEQ ID NO: 1722 - DNA, 74 bp, Artificial Sequence
  Description of Artificial Sequence: Synthetic oligonucleotide
gaaattaatacgactcactatagggatgaataaaaaaaagcacttcccccaagttttagagctatgctgttttg

SEQ ID NO: 1723 - DNA, 74 bp, Artificial Sequence
  Description of Artificial Sequence: Synthetic oligonucleotide
gaaattaatacgactcactatagggatgaataggtctttagttcctgaccacgttttagagctatgctgttttg

SEQ ID NO: 1724 - DNA, 74 bp, Artificial Sequence
  Description of Artificial Sequence: Synthetic oligonucleotide
gaaattaatacgactcactatagggatgaatacaaagcccactggactcagagttttagagctatgctgttttg

SEQ ID NO: 1725 - DNA, 74 bp, Artificial Sequence
  Description of Artificial Sequence: Synthetic oligonucleotide
gaaattaatacgactcactatagggatgaatagaagatggaccagggaccgagttttagagctatgctgttttg

SEQ ID NO: 1726 - DNA, 74 bp, Artificial Sequence
  Description of Artificial Sequence: Synthetic oligonucleotide
gaaattaatacgactcactatagggatgaatacttagaagaatttctaaaaagttttagagctatgctgttttg

SEQ ID NO: 1727 - DNA, 74 bp, Artificial Sequence
  Description of Artificial Sequence: Synthetic oligonucleotide
gaaattaatacgactcactatagggatgaatacaagagcaaaagggggaaaggttttagagctatgctgttttg

SEQ ID NO: 1728 - DNA, 74 bp, Artificial Sequence
  Description of Artificial Sequence: Synthetic oligonucleotide
gaaattaatacgactcactatagggatgaatatgtctgggaggaacccaacagttttagagctatgctgttttg

SEQ ID NO: 1729 - DNA, 74 bp, Artificial Sequence
  Description of Artificial Sequence: Synthetic oligonucleotide
gaaattaatacgactcactatagggatgaataaatctgcagtctctgaaggagttttagagctatgctgttttg

SEQ ID NO: 1730 - DNA, 74 bp, Artificial Sequence
  Description of Artificial Sequence: Synthetic oligonucleotide
gaaattaatacgactcactatagggatgaatagaaattcgttcactaccagggttttagagctatgctgttttg

SEQ ID NO: 1731 - DNA, 74 bp, Artificial Sequence
  Description of Artificial Sequence: Synthetic oligonucleotide
gaaattaatacgactcactatagggatgaatagaactggtctacgatcacaggttttagagctatgctgttttg

SEQ ID NO: 1732 - DNA, 74 bp, Artificial Sequence
  Description of Artificial Sequence: Synthetic oligonucleotide
gaaattaatacgactcactatagggatgaatactaattggagaagaacccacgttttagagctatgctgttttg

SEQ ID NO: 1733 - DNA, 74 bp, Artificial Sequence
  Description of Artificial Sequence: Synthetic oligonucleotide
gaaattaatacgactcactatagggatgaatataaatcctgagtcactgcaagttttagagctatgctgttttg

SEQ ID NO: 1734 - DNA, 74 bp, Artificial Sequence
  Description of Artificial Sequence: Synthetic oligonucleotide
gaaattaatacgactcactatagggatgaatactgctctcacagcacaatgagttttagagctatgctgttttg

SEQ ID NO: 1735 - DNA, 74 bp, Artificial Sequence
  Description of Artificial Sequence: Synthetic oligonucleotide
gaaattaatacgactcactatagggatgaatagtgagagatgcggccaaaacgttttagagctatgctgttttg

SEQ ID NO: 1736 - DNA, 74 bp, Artificial Sequence
  Description of Artificial Sequence: Synthetic oligonucleotide
gaaattaatacgactcactatagggatgaatagcattaaaccaccatagcgcgttttagagctatgctgttttg

SEQ ID NO: 1737 - DNA, 74 bp, Artificial Sequence
  Description of Artificial Sequence: Synthetic oligonucleotide
gaaattaatacgactcactatagggatgaatatgaatgagttctcctgctcagttttagagctatgctgttttg

SEQ ID NO: 1738 - DNA, 74 bp, Artificial Sequence
  Description of Artificial Sequence: Synthetic oligonucleotide
gaaattaatacgactcactatagggatgaataccggttcgaagtggctgcgcgttttagagctatgctgttttg

SEQ ID NO: 1739 - DNA, 74 bp, Artificial Sequence
  Description of Artificial Sequence: Synthetic oligonucleotide
gaaattaatacgactcactatagggatgaatacctgttccctgaaatgggcggttttagagctatgctgttttg

SEQ ID NO: 1740 - DNA, 74 bp, Artificial Sequence
  Description of Artificial Sequence: Synthetic oligonucleotide
gaaattaatacgactcactatagggatgaatatctcgccggtgtgactccgcgttttagagctatgctgttttg

SEQ ID NO: 1741 - DNA, 74 bp, Artificial Sequence
  Description of Artificial Sequence: Synthetic oligonucleotide
gaaattaatacgactcactatagggatgaataatttcccacagccttccacagttttagagctatgctgttttg

SEQ ID NO: 1742 - DNA, 74 bp, Artificial Sequence
  Description of Artificial Sequence: Synthetic oligonucleotide
gaaattaatacgactcactatagggatgaatacctgccacaggacacacgaagttttagagctatgctgttttg

SEQ ID NO: 1743 - DNA, 74 bp, Artificial Sequence
  Description of Artificial Sequence: Synthetic oligonucleotide
gaaattaatacgactcactatagggatgaatatgtgaagagtttattacaaggttttagagctatgctgttttg

SEQ ID NO: 1744 - DNA, 74 bp, Artificial Sequence
  Description of Artificial Sequence: Synthetic oligonucleotide
gaaattaatacgactcactatagggatgaatactggctggtaagttcactgcgttttagagctatgctgttttg

SEQ ID NO: 1745 - DNA, 74 bp, Artificial Sequence
  Description of Artificial Sequence: Synthetic oligonucleotide
gaaattaatacgactcactatagggatgaatacagctgggagagaagagggggttttagagctatgctgttttg

SEQ ID NO: 1746 - DNA, 74 bp, Artificial Sequence
  Description of Artificial Sequence: Synthetic oligonucleotide
gaaattaatacgactcactatagggatgaataccatgtagggcccagggcaggttttagagctatgctgttttg

SEQ ID NO: 1747 - DNA, 74 bp, Artificial Sequence
  Description of Artificial Sequence: Synthetic oligonucleotide
gaaattaatacgactcactatagggatgaatataattgctgtcagatagagcgttttagagctatgctgttttg

SEQ ID NO: 1748 - DNA, 74 bp, Artificial Sequence
  Description of Artificial Sequence: Synthetic oligonucleotide
gaaattaatacgactcactatagggatgaatatgatacaaacactggtggaggttttagagctatgctgttttg

SEQ ID NO: 1749 - DNA, 74 bp, Artificial Sequence
  Description of Artificial Sequence: Synthetic oligonucleotide
gaaattaatacgactcactatagggatgaataccaccacacatgagctgaaggttttagagctatgctgttttg

SEQ ID NO: 1750 - DNA, 74 bp, Artificial Sequence
  Description of Artificial Sequence: Synthetic oligonucleotide
gaaattaatacgactcactatagggatgaataatttattagctatttccaaagttttagagctatgctgttttg

SEQ ID NO: 1751 - DNA, 74 bp, Artificial Sequence
  Description of Artificial Sequence: Synthetic oligonucleotide
gaaattaatacgactcactatagggatgaatagaacaaagaaactacaccaagttttagagctatgctgttttg

SEQ ID NO: 1752 - DNA, 74 bp, Artificial Sequence
  Description of Artificial Sequence: Synthetic oligonucleotide
gaaattaatacgactcactatagggatgaataacaatggcccattttcaaaagttttagagctatgctgttttg

SEQ ID NO: 1753 - DNA, 74 bp, Artificial Sequence
  Description of Artificial Sequence: Synthetic oligonucleotide
gaaattaatacgactcactatagggatgaataaggactcccttcaaccccaagttttagagctatgctgttttg

SEQ ID NO: 1754 - DNA, 74 bp, Artificial Sequence
  Description of Artificial Sequence: Synthetic oligonucleotide
gaaattaatacgactcactatagggatgaatacagttgactatctgaagacagttttagagctatgctgttttg

SEQ ID NO: 1755 - DNA, 74 bp, Artificial Sequence
  Description of Artificial Sequence: Synthetic oligonucleotide
gaaattaatacgactcactatagggatgaatatataaggatgctaaaagtcagttttagagctatgctgttttg

SEQ ID NO: 1756 - DNA, 74 bp, Artificial Sequence
  Description of Artificial Sequence: Synthetic oligonucleotide
gaaattaatacgactcactatagggatgaatatatgttgaaatattgggagcgttttagagctatgctgttttg

SEQ ID NO: 1757 - DNA, 74 bp, Artificial Sequence
  Description of Artificial Sequence: Synthetic oligonucleotide
gaaattaatacgactcactatagggatgaataaagaataggggctggggacagttttagagctatgctgttttg

SEQ ID NO: 1758 - DNA, 74 bp, Artificial Sequence
  Description of Artificial Sequence: Synthetic oligonucleotide
gaaattaatacgactcactatagggatgaatatgacatctggtaacaacagagttttagagctatgctgttttg

SEQ ID NO: 1759 - DNA, 74 bp, Artificial Sequence
  Description of Artificial Sequence: Synthetic oligonucleotide
gaaattaatacgactcactatagggatgaatagggtatattgagagaaataagttttagagctatgctgttttg

SEQ ID NO: 1760 - DNA, 74 bp, Artificial Sequence
  Description of Artificial Sequence: Synthetic oligonucleotide
gaaattaatacgactcactatagggatgaatatgggctaggtgttttagccagttttagagctatgctgttttg

SEQ ID NO: 1761 - DNA, 74 bp, Artificial Sequence
  Description of Artificial Sequence: Synthetic oligonucleotide
gaaattaatacgactcactatagggatgaataccattgtaaactacagacccgttttagagctatgctgttttg

SEQ ID NO: 1762 - DNA, 74 bp, Artificial Sequence
  Description of Artificial Sequence: Synthetic oligonucleotide
gaaattaatacgactcactatagggatgaatactgctgttttggttgtcagcgttttagagctatgctgttttg

SEQ ID NO: 1763 - DNA, 74 bp, Artificial Sequence
  Description of Artificial Sequence: Synthetic oligonucleotide
gaaattaatacgactcactatagggatgaatactgagcctcctggcggcacagttttagagctatgctgttttg

SEQ ID NO: 1764 - DNA, 74 bp, Artificial Sequence
  Description of Artificial Sequence: Synthetic oligonucleotide
gaaattaatacgactcactatagggatgaataggacccgccccacccgcacggttttagagctatgctgttttg

SEQ ID NO: 1765 - DNA, 74 bp, Artificial Sequence
  Description of Artificial Sequence: Synthetic oligonucleotide
gaaattaatacgactcactatagggatgaataggagaagcagaagccggtgcgttttagagctatgctgttttg

SEQ ID NO: 1766 - DNA, 74 bp, Artificial Sequence
  Description of Artificial Sequence: Synthetic oligonucleotide
gaaattaatacgactcactatagggatgaatacagagctggtcttcaggaacgttttagagctatgctgttttg

SEQ ID NO: 1767 - DNA, 74 bp, Artificial Sequence
  Description of Artificial Sequence: Synthetic oligonucleotide
gaaattaatacgactcactatagggatgaataactagagtttatagaaacgggttttagagctatgctgttttg

SEQ ID NO: 1768 - DNA, 74 bp, Artificial Sequence
  Description of Artificial Sequence: Synthetic oligonucleotide
gaaattaatacgactcactatagggatgaatactgtatcattagggaaaacagttttagagctatgctgttttg

SEQ ID NO: 1769 - DNA, 74 bp, Artificial Sequence
  Description of Artificial Sequence: Synthetic oligonucleotide
gaaattaatacgactcactatagggatgaatactttgaaaagatgcaccgaggttttagagctatgctgttttg

SEQ ID NO: 1770 - DNA, 74 bp, Artificial Sequence
  Description of Artificial Sequence: Synthetic oligonucleotide
gaaattaatacgactcactatagggatgaatacaaggctgatgggaagcaacgttttagagctatgctgttttg

SEQ ID NO: 1771 - DNA, 74 bp, Artificial Sequence
  Description of Artificial Sequence: Synthetic oligonucleotide
gaaattaatacgactcactatagggatgaatatcttctgggacagctcagccgttttagagctatgctgttttg

SEQ ID NO: 1772 - DNA, 74 bp, Artificial Sequence
  Description of Artificial Sequence: Synthetic oligonucleotide
gaaattaatacgactcactatagggatgaataagaggggactcggttgagacgttttagagctatgctgttttg

SEQ ID NO: 1773 - DNA, 74 bp, Artificial Sequence
  Description of Artificial Sequence: Synthetic oligonucleotide
gaaattaatacgactcactatagggatgaatatttataaaggccaggcacgggttttagagctatgctgttttg

SEQ ID NO: 1774 - DNA, 74 bp, Artificial Sequence
  Description of Artificial Sequence: Synthetic oligonucleotide
gaaattaatacgactcactatagggatgaataaatctatgtaaagtgtcagggttttagagctatgctgttttg

SEQ ID NO: 1775 - DNA, 74 bp, Artificial Sequence
  Description of Artificial Sequence: Synthetic oligonucleotide
gaaattaatacgactcactatagggatgaatagctcacagatctgggaggaggttttagagctatgctgttttg

SEQ ID NO: 1776 - DNA, 74 bp, Artificial Sequence
  Description of Artificial Sequence: Synthetic oligonucleotide
gaaattaatacgactcactatagggatgaatatgtgctgggctcagagccaggttttagagctatgctgttttg

SEQ ID NO: 1777 - DNA, 74 bp, Artificial Sequence
  Description of Artificial Sequence: Synthetic oligonucleotide
gaaattaatacgactcactatagggatgaatatcatgtcctttgtggggacagttttagagctatgctgttttg

SEQ ID NO: 1778 - DNA, 74 bp, Artificial Sequence
  Description of Artificial Sequence: Synthetic oligonucleotide
gaaattaatacgactcactatagggatgaataaatgtccaacaatgatagacgttttagagctatgctgttttg

SEQ ID NO: 1779 - DNA, 74 bp, Artificial Sequence
  Description of Artificial Sequence: Synthetic oligonucleotide
gaaattaatacgactcactatagggatgaatacaacagctcattctcaataagttttagagctatgctgttttg

SEQ ID NO: 1780 - DNA, 74 bp, Artificial Sequence
  Description of Artificial Sequence: Synthetic oligonucleotide
gaaattaatacgactcactatagggatgaataccattatataataataaaaagttttagagctatgctgttttg

SEQ ID NO: 1781 - DNA, 74 bp, Artificial Sequence
  Description of Artificial Sequence: Synthetic oligonucleotide
gaaattaatacgactcactatagggatgaataagattgagatgtgacgcaaagttttagagctatgctgttttg

SEQ ID NO: 1782 - DNA, 74 bp, Artificial Sequence
  Description of Artificial Sequence: Synthetic oligonucleotide
gaaattaatacgactcactatagggatgaataagaggaacatgtcattgtcagttttagagctatgctgttttg

SEQ ID NO: 1783 - DNA, 74 bp, Artificial Sequence
  Description of Artificial Sequence: Synthetic oligonucleotide
gaaattaatacgactcactatagggatgaatactttattctctgctgtgacagttttagagctatgctgttttg

SEQ ID NO: 1784 - DNA, 74 bp, Artificial Sequence
  Description of Artificial Sequence: Synthetic oligonucleotide
gaaattaatacgactcactatagggatgaatatcaagttctgactgctggaagttttagagctatgctgttttg

SEQ ID NO: 1785 - DNA, 74 bp, Artificial Sequence
  Description of Artificial Sequence: Synthetic oligonucleotide
gaaattaatacgactcactatagggatgaatacaagactaattccagtgccagttttagagctatgctgttttg

SEQ ID NO: 1786 - DNA, 74 bp, Artificial Sequence
  Description of Artificial Sequence: Synthetic oligonucleotide
gaaattaatacgactcactatagggatgaataaggatggatcctgcaaccccgttttagagctatgctgttttg

SEQ ID NO: 1787 - DNA, 74 bp, Artificial Sequence
  Description of Artificial Sequence: Synthetic oligonucleotide
gaaattaatacgactcactatagggatgaatactggaagctttgtcccagaggttttagagctatgctgttttg

SEQ ID NO: 1788 - DNA, 74 bp, Artificial Sequence
  Description of Artificial Sequence: Synthetic oligonucleotide
gaaattaatacgactcactatagggatgaataaaaggtagtacctttggccagttttagagctatgctgttttg

SEQ ID NO: 1789 - DNA, 74 bp, Artificial Sequence
  Description of Artificial Sequence: Synthetic oligonucleotide
gaaattaatacgactcactatagggatgaataatatgatttttttttcaagagttttagagctatgctgttttg

SEQ ID NO: 1790 - DNA, 74 bp, Artificial Sequence
  Description of Artificial Sequence: Synthetic oligonucleotide
gaaattaatacgactcactatagggatgaataggaaagatttcaaggagtacgttttagagctatgctgttttg

SEQ ID NO: 1791 - DNA, 74 bp, Artificial Sequence
  Description of Artificial Sequence: Synthetic oligonucleotide
gaaattaatacgactcactatagggatgaatacaagatctgaacaaacaaaggttttagagctatgctgttttg

SEQ ID NO: 1792 - DNA, 74 bp, Artificial Sequence
  Description of Artificial Sequence: Synthetic oligonucleotide
gaaattaatacgactcactatagggatgaataccaccaatagtgagcccccagttttagagctatgctgttttg

SEQ ID NO: 1793 - DNA, 74 bp, Artificial Sequence
  Description of Artificial Sequence: Synthetic oligonucleotide
gaaattaatacgactcactatagggatgaatagtactaatctcttagagtgggttttagagctatgctgttttg

SEQ ID NO: 1794 - DNA, 74 bp, Artificial Sequence
  Description of Artificial Sequence: Synthetic oligonucleotide
gaaattaatacgactcactatagggatgaataaaaggcaagtgcagttgagggttttagagctatgctgttttg

SEQ ID NO: 1795 - DNA, 74 bp, Artificial Sequence
  Description of Artificial Sequence: Synthetic oligonucleotide
gaaattaatacgactcactatagggatgaatacctctccctctagcttccaggttttagagctatgctgttttg

SEQ ID NO: 1796 - DNA, 74 bp, Artificial Sequence
  Description of Artificial Sequence: Synthetic oligonucleotide
gaaattaatacgactcactatagggatgaataatatgaaaattcactaagaagttttagagctatgctgttttg

SEQ ID NO: 1797 - DNA, 74 bp, Artificial Sequence
  Description of Artificial Sequence: Synthetic oligonucleotide
gaaattaatacgactcactatagggatgaatagtttctatgaaccaatgacggttttagagctatgctgttttg

SEQ ID NO: 1798 - DNA, 74 bp, Artificial Sequence
  Description of Artificial Sequence: Synthetic oligonucleotide
gaaattaatacgactcactatagggatgaatagtaatggaatggttaagagcgttttagagctatgctgttttg

SEQ ID NO: 1799 - DNA, 74 bp, Artificial Sequence
  Description of Artificial Sequence: Synthetic oligonucleotide
gaaattaatacgactcactatagggatgaataacattctagtgttagccaaggttttagagctatgctgttttg

SEQ ID NO: 1800 - DNA, 74 bp, Artificial Sequence
  Description of Artificial Sequence: Synthetic oligonucleotide
gaaattaatacgactcactatagggatgaataccagctggaatacctgagcagttttagagctatgctgttttg

SEQ ID NO: 1801 - DNA, 74 bp, Artificial Sequence
  Description of Artificial Sequence: Synthetic oligonucleotide
gaaattaatacgactcactatagggatgaataggagcagaggaaatacagacgttttagagctatgctgttttg

SEQ ID NO: 1802 - DNA, 74 bp, Artificial Sequence
  Description of Artificial Sequence: Synthetic oligonucleotide
gaaattaatacgactcactatagggatgaatatagcagggaagtgctcctgcgttttagagctatgctgttttg

SEQ ID NO: 1803 - DNA, 74 bp, Artificial Sequence
  Description of Artificial Sequence: Synthetic oligonucleotide
gaaattaatacgactcactatagggatgaatatcagataagtaggctggagagttttagagctatgctgttttg

SEQ ID NO: 1804 - DNA, 74 bp, Artificial Sequence
  Description of Artificial Sequence: Synthetic oligonucleotide
gaaattaatacgactcactatagggatgaatatgagtatcctatgaaggagagttttagagctatgctgttttg

SEQ ID NO: 1805 - DNA, 74 bp, Artificial Sequence
  Description of Artificial Sequence: Synthetic oligonucleotide
gaaattaatacgactcactatagggatgaatatcttgtggttctgactgagggttttagagctatgctgttttg

SEQ ID NO: 1806 - DNA, 74 bp, Artificial Sequence
  Description of Artificial Sequence: Synthetic oligonucleotide
gaaattaatacgactcactatagggatgaatatgattaatgaggcttggagagttttagagctatgctgttttg

SEQ ID NO: 1807 - DNA, 74 bp, Artificial Sequence
  Description of Artificial Sequence: Synthetic oligonucleotide
gaaattaatacgactcactatagggatgaataaaaaaatcttaaactgctgcgttttagagctatgctgttttg

SEQ ID NO: 1808 - DNA, 74 bp, Artificial Sequence
  Description of Artificial Sequence: Synthetic oligonucleotide
gaaattaatacgactcactatagggatgaataaagactggatgtaagccccggttttagagctatgctgttttg

SEQ ID NO: 1809 - DNA, 74 bp, Artificial Sequence
  Description of Artificial Sequence: Synthetic oligonucleotide
gaaattaatacgactcactatagggatgaatagaagaggtaggcaagtgtaggttttagagctatgctgttttg

SEQ ID NO: 1810 - DNA, 74 bp, Artificial Sequence
  Description of Artificial Sequence: Synthetic oligonucleotide
gaaattaatacgactcactatagggatgaataggaggggagatcagggagcagttttagagctatgctgttttg

SEQ ID NO: 1811 - DNA, 74 bp, Artificial Sequence
  Description of Artificial Sequence: Synthetic oligonucleotide
gaaattaatacgactcactatagggatgaatacctgtctgtggagctcaaacgttttagagctatgctgttttg

SEQ ID NO: 1812 - DNA, 74 bp, Artificial Sequence
  Description of Artificial Sequence: Synthetic oligonucleotide
gaaattaatacgactcactatagggatgaatattgtaccttagttcccgaaggttttagagctatgctgttttg

SEQ ID NO: 1813 - DNA, 74 bp, Artificial Sequence
  Description of Artificial Sequence: Synthetic oligonucleotide
gaaattaatacgactcactatagggatgaatagctccagtaacacatggcaggttttagagctatgctgttttg

SEQ ID NO: 1814 - DNA, 74 bp, Artificial Sequence
  Description of Artificial Sequence: Synthetic oligonucleotide
gaaattaatacgactcactatagggatgaataagttctgcactggtcaggcagttttagagctatgctgttttg

SEQ ID NO: 1815 - DNA, 74 bp, Artificial Sequence
  Description of Artificial Sequence: Synthetic oligonucleotide
gaaattaatacgactcactatagggatgaataagggtttgctgtgggcctgggttttagagctatgctgttttg

SEQ ID NO: 1816 - DNA, 74 bp, Artificial Sequence
  Description of Artificial Sequence: Synthetic oligonucleotide
gaaattaatacgactcactatagggatgaatatgtgcctagtttcactctgggttttagagctatgctgttttg

SEQ ID NO: 1817 - DNA, 74 bp, Artificial Sequence
  Description of Artificial Sequence: Synthetic oligonucleotide
gaaattaatacgactcactatagggatgaatatctgtgcatctctgcaggcagttttagagctatgctgttttg

SEQ ID NO: 1818 - DNA, 74 bp, Artificial Sequence
  Description of Artificial Sequence: Synthetic oligonucleotide
gaaattaatacgactcactatagggatgaataactgtgcacattcacgctaggttttagagctatgctgttttg

SEQ ID NO: 1819 - DNA, 74 bp, Artificial Sequence
  Description of Artificial Sequence: Synthetic oligonucleotide
gaaattaatacgactcactatagggatgaatagagcaaatacagttcagcacgttttagagctatgctgttttg

SEQ ID NO: 1820 - DNA, 74 bp, Artificial Sequence
  Description of Artificial Sequence: Synthetic oligonucleotide
gaaattaatacgactcactatagggatgaatatctgtatgcagcaaaaccaggttttagagctatgctgttttg

SEQ ID NO: 1821 - DNA, 74 bp, Artificial Sequence
  Description of Artificial Sequence: Synthetic oligonucleotide
gaaattaatacgactcactatagggatgaatacctttcctccgtcttcctaagttttagagctatgctgttttg

SEQ ID NO: 1822 - DNA, 74 bp, Artificial Sequence
  Description of Artificial Sequence: Synthetic oligonucleotide
gaaattaatacgactcactatagggatgaatacaactgagagtcacagagccgttttagagctatgctgttttg

SEQ ID NO: 1823 - DNA, 74 bp, Artificial Sequence
  Description of Artificial Sequence: Synthetic oligonucleotide
gaaattaatacgactcactatagggatgaatataataaacaaaactcacaaagttttagagctatgctgttttg

SEQ ID NO: 1824 - DNA, 74 bp, Artificial Sequence
  Description of Artificial Sequence: Synthetic oligonucleotide
gaaattaatacgactcactatagggatgaatattgagtatactcctgacggggttttagagctatgctgttttg

SEQ ID NO: 1825 - DNA, 74 bp, Artificial Sequence
  Description of Artificial Sequence: Synthetic oligonucleotide
gaaattaatacgactcactatagggatgaataaaaagaaaagaaattgaaccgttttagagctatgctgttttg

SEQ ID NO: 1826 - DNA, 74 bp, Artificial Sequence
  Description of Artificial Sequence: Synthetic oligonucleotide
gaaattaatacgactcactatagggatgaatatagctagttgggagttgagggttttagagctatgctgttttg

SEQ ID NO: 1827 - DNA, 74 bp, Artificial Sequence
  Description of Artificial Sequence: Synthetic oligonucleotide
gaaattaatacgactcactatagggatgaataaagaattgggccaggcgtgggttttagagctatgctgttttg

SEQ ID NO: 1828 - DNA, 74 bp, Artificial Sequence
  Description of Artificial Sequence: Synthetic oligonucleotide
gaaattaatacgactcactatagggatgaataaaagacaaagtactttagacgttttagagctatgctgttttg

SEQ ID NO: 1829 - DNA, 74 bp, Artificial Sequence
  Description of Artificial Sequence: Synthetic oligonucleotide
gaaattaatacgactcactatagggatgaatacagtctgtcatcaaaagcacgttttagagctatgctgttttg

SEQ ID NO: 1830 - DNA, 74 bp, Artificial Sequence
  Description of Artificial Sequence: Synthetic oligonucleotide
gaaattaatacgactcactatagggatgaatacctttctgtttccatggtcagttttagagctatgctgttttg

SEQ ID NO: 1831 - DNA, 74 bp, Artificial Sequence
  Description of Artificial Sequence: Synthetic oligonucleotide
gaaattaatacgactcactatagggatgaataaaacgagtgttggacaaagggttttagagctatgctgttttg

SEQ ID NO: 1832 - DNA, 74 bp, Artificial Sequence
  Description of Artificial Sequence: Synthetic oligonucleotide
gaaattaatacgactcactatagggatgaatagtttactggtctgaaagggagttttagagctatgctgttttg

SEQ ID NO: 1833 - DNA, 74 bp, Artificial Sequence
  Description of Artificial Sequence: Synthetic oligonucleotide
gaaattaatacgactcactatagggatgaatacagagagggggtagtcctaggttttagagctatgctgttttg

SEQ ID NO: 1834 - DNA, 74 bp, Artificial Sequence
  Description of Artificial Sequence: Synthetic oligonucleotide
gaaattaatacgactcactatagggatgaatattgtgtttcattagaagaaagttttagagctatgctgttttg

SEQ ID NO: 1835 - DNA, 74 bp, Artificial Sequence
  Description of Artificial Sequence: Synthetic oligonucleotide
gaaattaatacgactcactatagggatgaataattagagattgctgagctgggttttagagctatgctgttttg

SEQ ID NO: 1836 - DNA, 74 bp, Artificial Sequence
  Description of Artificial Sequence: Synthetic oligonucleotide
gaaattaatacgactcactatagggatgaatagttttacctctgtggtataagttttagagctatgctgttttg

SEQ ID NO: 1837 - DNA, 74 bp, Artificial Sequence
  Description of Artificial Sequence: Synthetic oligonucleotide
gaaattaatacgactcactatagggatgaatacataaagagactagtggtaagttttagagctatgctgttttg

SEQ ID NO: 1838 - DNA, 74 bp, Artificial Sequence
  Description of Artificial Sequence: Synthetic oligonucleotide
gaaattaatacgactcactatagggatgaatacagttcactcacttgtaaccgttttagagctatgctgttttg

SEQ ID NO: 1839 - DNA, 74 bp, Artificial Sequence
  Description of Artificial Sequence: Synthetic oligonucleotide
gaaattaatacgactcactatagggatgaataaatttagggcagcagcataagttttagagctatgctgttttg

SEQ ID NO: 1840 - DNA, 74 bp, Artificial Sequence
  Description of Artificial Sequence: Synthetic oligonucleotide
gaaattaatacgactcactatagggatgaataatgagaaacacagctgatacgttttagagctatgctgttttg

SEQ ID NO: 1841 - DNA, 74 bp, Artificial Sequence
  Description of Artificial Sequence: Synthetic oligonucleotide
gaaattaatacgactcactatagggatgaataagagatcaggtgctaaaaacgttttagagctatgctgttttg

SEQ ID NO: 1842 - DNA, 74 bp, Artificial Sequence
  Description of Artificial Sequence: Synthetic oligonucleotide
gaaattaatacgactcactatagggatgaataactatggaaaagcaagcagagttttagagctatgctgttttg

SEQ ID NO: 1843 - DNA, 74 bp, Artificial Sequence
  Description of Artificial Sequence: Synthetic oligonucleotide
gaaattaatacgactcactatagggatgaatactgagggaagatgggtaggagttttagagctatgctgttttg

SEQ ID NO: 1844 - DNA, 74 bp, Artificial Sequence
  Description of Artificial Sequence: Synthetic oligonucleotide
gaaattaatacgactcactatagggatgaataaatattattcaaccttaaaagttttagagctatgctgttttg

SEQ ID NO: 1845 - DNA, 74 bp, Artificial Sequence
  Description of Artificial Sequence: Synthetic oligonucleotide
gaaattaatacgactcactatagggatgaatatgtcaatcccagaagaagaagttttagagctatgctgttttg

SEQ ID NO: 1846 - DNA, 74 bp, Artificial Sequence
  Description of Artificial Sequence: Synthetic oligonucleotide
gaaattaatacgactcactatagggatgaataaatactcaggtctggggaaggttttagagctatgctgttttg

SEQ ID NO: 1847 - DNA, 74 bp, Artificial Sequence
  Description of Artificial Sequence: Synthetic oligonucleotide
gaaattaatacgactcactatagggatgaatacagcaaactctcaataaagggttttagagctatgctgttttg

SEQ ID NO: 1848 - DNA, 74 bp, Artificial Sequence
  Description of Artificial Sequence: Synthetic oligonucleotide
gaaattaatacgactcactatagggatgaatagggtgggcatggtgcagaaggttttagagctatgctgttttg

SEQ ID NO: 1849 - DNA, 74 bp, Artificial Sequence
  Description of Artificial Sequence: Synthetic oligonucleotide
gaaattaatacgactcactatagggatgaatatttaccagcaactgggatgagttttagagctatgctgttttg

SEQ ID NO: 1850 - DNA, 74 bp, Artificial Sequence
  Description of Artificial Sequence: Synthetic oligonucleotide
gaaattaatacgactcactatagggatgaataccagtgtgcaggcagcctgagttttagagctatgctgttttg

SEQ ID NO: 1851 - DNA, 74 bp, Artificial Sequence
  Description of Artificial Sequence: Synthetic oligonucleotide
gaaattaatacgactcactatagggatgaatagagtaattactctggtgtacgttttagagctatgctgttttg

SEQ ID NO: 1852 - DNA, 74 bp, Artificial Sequence
  Description of Artificial Sequence: Synthetic oligonucleotide
gaaattaatacgactcactatagggatgaataagggtggctcaactcagccagttttagagctatgctgttttg

SEQ ID NO: 1853 - DNA, 74 bp, Artificial Sequence
  Description of Artificial Sequence: Synthetic oligonucleotide
gaaattaatacgactcactatagggatgaatataacagcggctcagaccacggttttagagctatgctgttttg

SEQ ID NO: 1854 - DNA, 74 bp, Artificial Sequence
  Description of Artificial Sequence: Synthetic oligonucleotide
gaaattaatacgactcactatagggatgaataccacctgggatttgagatgcgttttagagctatgctgttttg

SEQ ID NO: 1855 - DNA, 74 bp, Artificial Sequence
  Description of Artificial Sequence: Synthetic oligonucleotide
gaaattaatacgactcactatagggatgaatatcttggggttgagtttggcagttttagagctatgctgttttg

SEQ ID NO: 1856 - DNA, 74 bp, Artificial Sequence
  Description of Artificial Sequence: Synthetic oligonucleotide
gaaattaatacgactcactatagggatgaatagctgcctgggattgagagaggttttagagctatgctgttttg

SEQ ID NO: 1857 - DNA, 74 bp, Artificial Sequence
  Description of Artificial Sequence: Synthetic oligonucleotide
gaaattaatacgactcactatagggatgaataactatgttctcttctggcccgttttagagctatgctgttttg

SEQ ID NO: 1858 - DNA, 74 bp, Artificial Sequence
  Description of Artificial Sequence: Synthetic oligonucleotide
gaaattaatacgactcactatagggatgaataatggcccatgacatgtgaccgttttagagctatgctgttttg

SEQ ID NO: 1859 - DNA, 74 bp, Artificial Sequence
  Description of Artificial Sequence: Synthetic oligonucleotide
gaaattaatacgactcactatagggatgaatagagatcttgtctgagagccagttttagagctatgctgttttg

SEQ ID NO: 1860 - DNA, 74 bp, Artificial Sequence
  Description of Artificial Sequence: Synthetic oligonucleotide
gaaattaatacgactcactatagggatgaataataacacttggtctcacacagttttagagctatgctgttttg

SEQ ID NO: 1861 - DNA, 74 bp, Artificial Sequence
  Description of Artificial Sequence: Synthetic oligonucleotide
gaaattaatacgactcactatagggatgaatagcagatgcagagctggaaaggttttagagctatgctgttttg

SEQ ID NO: 1862 - DNA, 74 bp, Artificial Sequence
  Description of Artificial Sequence: Synthetic oligonucleotide
gaaattaatacgactcactatagggatgaataactcaggggcccagagaagagttttagagctatgctgttttg

SEQ ID NO: 1863 - DNA, 74 bp, Artificial Sequence
  Description of Artificial Sequence: Synthetic oligonucleotide
gaaattaatacgactcactatagggatgaataggtccctcagagactgataagttttagagctatgctgttttg

SEQ ID NO: 1864 - DNA, 74 bp, Artificial Sequence
  Description of Artificial Sequence: Synthetic oligonucleotide
gaaattaatacgactcactatagggatgaataattcagccctttcccaccaagttttagagctatgctgttttg

SEQ ID NO: 1865 - DNA, 74 bp, Artificial Sequence
  Description of Artificial Sequence: Synthetic oligonucleotide
gaaattaatacgactcactatagggatgaataaatcgtggcttgcaccagaggttttagagctatgctgttttg

SEQ ID NO: 1866 - DNA, 74 bp, Artificial Sequence
  Description of Artificial Sequence: Synthetic oligonucleotide
gaaattaatacgactcactatagggatgaatactgctgagaattgactggaggttttagagctatgctgttttg

SEQ ID NO: 1867 - DNA, 74 bp, Artificial Sequence
  Description of Artificial Sequence: Synthetic oligonucleotide
gaaattaatacgactcactatagggatgaatattagtgaggatgggatggcggttttagagctatgctgttttg

SEQ ID NO: 1868 - DNA, 74 bp, Artificial Sequence
  Description of Artificial Sequence: Synthetic oligonucleotide
gaaattaatacgactcactatagggatgaatagagtgttggaaaaaatatcagttttagagctatgctgttttg

SEQ ID NO: 1869 - DNA, 74 bp, Artificial Sequence
  Description of Artificial Sequence: Synthetic oligonucleotide
gaaattaatacgactcactatagggatgaatatcaggccagagggacaatgggttttagagctatgctgttttg

SEQ ID NO: 1870 - DNA, 74 bp, Artificial Sequence
  Description of Artificial Sequence: Synthetic oligonucleotide
gaaattaatacgactcactatagggatgaatagcatgtggaaatttgtgaaagttttagagctatgctgttttg

SEQ ID NO: 1871 - DNA, 74 bp, Artificial Sequence
  Description of Artificial Sequence: Synthetic oligonucleotide
gaaattaatacgactcactatagggatgaataattgtggcacacctgaggccgttttagagctatgctgttttg

SEQ ID NO: 1872 - DNA, 74 bp, Artificial Sequence
  Description of Artificial Sequence: Synthetic oligonucleotide
gaaattaatacgactcactatagggatgaataataaaataggagtgatgtcagttttagagctatgctgttttg

SEQ ID NO: 1873 - DNA, 74 bp, Artificial Sequence
  Description of Artificial Sequence: Synthetic oligonucleotide
gaaattaatacgactcactatagggatgaatagctaatggaaattaaagtcagttttagagctatgctgttttg

SEQ ID NO: 1874 - DNA, 74 bp, Artificial Sequence
  Description of Artificial Sequence: Synthetic oligonucleotide
gaaattaatacgactcactatagggatgaatataagtctgcagttggtggccgttttagagctatgctgttttg

SEQ ID NO: 1875 - DNA, 74 bp, Artificial Sequence
  Description of Artificial Sequence: Synthetic oligonucleotide
gaaattaatacgactcactatagggatgaataacagcaaagggcctggagccgttttagagctatgctgttttg

SEQ ID NO: 1876 - DNA, 74 bp, Artificial Sequence
  Description of Artificial Sequence: Synthetic oligonucleotide
gaaattaatacgactcactatagggatgaataagtggagactgtgttactgggttttagagctatgctgttttg

SEQ ID NO: 1877 - DNA, 74 bp, Artificial Sequence
  Description of Artificial Sequence: Synthetic oligonucleotide
gaaattaatacgactcactatagggatgaataaaaaacaacaactgtggcaagttttagagctatgctgttttg

SEQ ID NO: 1878 - DNA, 74 bp, Artificial Sequence
  Description of Artificial Sequence: Synthetic oligonucleotide
gaaattaatacgactcactatagggatgaatatgaagagggtgaactggagcgttttagagctatgctgttttg

SEQ ID NO: 1879 - DNA, 74 bp, Artificial Sequence
  Description of Artificial Sequence: Synthetic oligonucleotide
gaaattaatacgactcactatagggatgaatattgctgggtcccatacaagagttttagagctatgctgttttg

SEQ ID NO: 1880 - DNA, 74 bp, Artificial Sequence
  Description of Artificial Sequence: Synthetic oligonucleotide
gaaattaatacgactcactatagggatgaatagggaccaaatattctgccaagttttagagctatgctgttttg

SEQ ID NO: 1881 - DNA, 74 bp, Artificial Sequence
  Description of Artificial Sequence: Synthetic oligonucleotide
gaaattaatacgactcactatagggatgaatagaaagggaagaaaatgagaagttttagagctatgctgttttg

SEQ ID NO: 1882 - DNA, 74 bp, Artificial Sequence
  Description of Artificial Sequence: Synthetic oligonucleotide
gaaattaatacgactcactatagggatgaatacttcagtgtataacataagggttttagagctatgctgttttg

SEQ ID NO: 1883 - DNA, 74 bp, Artificial Sequence
  Description of Artificial Sequence: Synthetic oligonucleotide
gaaattaatacgactcactatagggatgaatactttaatcaaagcagtatccgttttagagctatgctgttttg

SEQ ID NO: 1884 - DNA, 74 bp, Artificial Sequence
  Description of Artificial Sequence: Synthetic oligonucleotide
gaaattaatacgactcactatagggatgaatacttcattgacaggaccatgagttttagagctatgctgttttg

SEQ ID NO: 1885 - DNA, 74 bp, Artificial Sequence
  Description of Artificial Sequence: Synthetic oligonucleotide
gaaattaatacgactcactatagggatgaatatttattggtgtattgtaggcgttttagagctatgctgttttg

SEQ ID NO: 1886 - DNA, 74 bp, Artificial Sequence
  Description of Artificial Sequence: Synthetic oligonucleotide
gaaattaatacgactcactatagggatgaatattgagctcctgtgcatccgagttttagagctatgctgttttg

SEQ ID NO: 1887 - DNA, 74 bp, Artificial Sequence
  Description of Artificial Sequence: Synthetic oligonucleotide
gaaattaatacgactcactatagggatgaatatcttaacttttcttcaacaagttttagagctatgctgttttg

SEQ ID NO: 1888 - DNA, 74 bp, Artificial Sequence
  Description of Artificial Sequence: Synthetic oligonucleotide
gaaattaatacgactcactatagggatgaatattggtaagacacttgggtgcgttttagagctatgctgttttg

SEQ ID NO: 1889 - DNA, 74 bp, Artificial Sequence
  Description of Artificial Sequence: Synthetic oligonucleotide
gaaattaatacgactcactatagggatgaataaataaattgctctcaggtccgttttagagctatgctgttttg

SEQ ID NO: 1890 - DNA, 74 bp, Artificial Sequence
  Description of Artificial Sequence: Synthetic oligonucleotide
gaaattaatacgactcactatagggatgaataagtggctgtggcaagtcagggttttagagctatgctgttttg

SEQ ID NO: 1891 - DNA, 74 bp, Artificial Sequence
  Description of Artificial Sequence: Synthetic oligonucleotide
gaaattaatacgactcactatagggatgaatatagccttatggattgactacgttttagagctatgctgttttg

SEQ ID NO: 1892 - DNA, 74 bp, Artificial Sequence
  Description of Artificial Sequence: Synthetic oligonucleotide
gaaattaatacgactcactatagggatgaataatattctatgcgttctgggggttttagagctatgctgttttg

SEQ ID NO: 1893 - DNA, 74 bp, Artificial Sequence
  Description of Artificial Sequence: Synthetic oligonucleotide
gaaattaatacgactcactatagggatgaataaggacattcaacttgtctgcgttttagagctatgctgttttg

SEQ ID NO: 1894 - DNA, 74 bp, Artificial Sequence
  Description of Artificial Sequence: Synthetic oligonucleotide
gaaattaatacgactcactatagggatgaatagtaatgaagggtagaaaccagttttagagctatgctgttttg

SEQ ID NO: 1895 - DNA, 74 bp, Artificial Sequence
  Description of Artificial Sequence: Synthetic oligonucleotide
gaaattaatacgactcactatagggatgaataaatatagtttcagaagagaagttttagagctatgctgttttg

SEQ ID NO: 1896 - DNA, 74 bp, Artificial Sequence
  Description of Artificial Sequence: Synthetic oligonucleotide
gaaattaatacgactcactatagggatgaatacttagaggtacatagaataagttttagagctatgctgttttg

SEQ ID NO: 1897 - DNA, 74 bp, Artificial Sequence
  Description of Artificial Sequence: Synthetic oligonucleotide
gaaattaatacgactcactatagggatgaatattgagcaactaaatgaatgggttttagagctatgctgttttg

SEQ ID NO: 1898 - DNA, 74 bp, Artificial Sequence
  Description of Artificial Sequence: Synthetic oligonucleotide
gaaattaatacgactcactatagggatgaataaggacctgaggtagcgagaagttttagagctatgctgttttg

SEQ ID NO: 1899 - DNA, 74 bp, Artificial Sequence
  Description of Artificial Sequence: Synthetic oligonucleotide
gaaattaatacgactcactatagggatgaatacatggaagatttctctgaaagttttagagctatgctgttttg

SEQ ID NO: 1900 - DNA, 74 bp, Artificial Sequence
  Description of Artificial Sequence: Synthetic oligonucleotide
gaaattaatacgactcactatagggatgaataatgccaatccactgaggtaggttttagagctatgctgttttg

SEQ ID NO: 1901 - DNA, 74 bp, Artificial Sequence
  Description of Artificial Sequence: Synthetic oligonucleotide
gaaattaatacgactcactatagggatgaataagtactattcagcaataagagttttagagctatgctgttttg

SEQ ID NO: 1902 - DNA, 74 bp, Artificial Sequence
  Description of Artificial Sequence: Synthetic oligonucleotide
gaaattaatacgactcactatagggatgaataacatagaaaactgtacataagttttagagctatgctgttttg

SEQ ID NO: 1903 - DNA, 74 bp, Artificial Sequence
  Description of Artificial Sequence: Synthetic oligonucleotide
gaaattaatacgactcactatagggatgaataagactgtctgtgtaacacaagttttagagctatgctgttttg

SEQ ID NO: 1904 - DNA, 74 bp, Artificial Sequence
  Description of Artificial Sequence: Synthetic oligonucleotide
gaaattaatacgactcactatagggatgaatagaacattttcatttgtgtcagttttagagctatgctgttttg

SEQ ID NO: 1905 - DNA, 74 bp, Artificial Sequence
  Description of Artificial Sequence: Synthetic oligonucleotide
gaaattaatacgactcactatagggatgaataagaaaccagttcccttgagcgttttagagctatgctgttttg

SEQ ID NO: 1906 - DNA, 74 bp, Artificial Sequence
  Description of Artificial Sequence: Synthetic oligonucleotide
gaaattaatacgactcactatagggatgaatactaggtcccataattaatgagttttagagctatgctgttttg

SEQ ID NO: 1907 - DNA, 74 bp, Artificial Sequence
  Description of Artificial Sequence: Synthetic oligonucleotide
gaaattaatacgactcactatagggatgaatatttattgtggctctccaagagttttagagctatgctgttttg

SEQ ID NO: 1908 - DNA, 74 bp, Artificial Sequence
  Description of Artificial Sequence: Synthetic oligonucleotide
gaaattaatacgactcactatagggatgaatataatctgagtattcaagaaggttttagagctatgctgttttg

SEQ ID NO: 1909 - DNA, 74 bp, Artificial Sequence
  Description of Artificial Sequence: Synthetic oligonucleotide
gaaattaatacgactcactatagggatgaatattgaaaactggcacaagacagttttagagctatgctgttttg

SEQ ID NO: 1910 - DNA, 74 bp, Artificial Sequence
  Description of Artificial Sequence: Synthetic oligonucleotide
gaaattaatacgactcactatagggatgaatatggggcagccaagggagtgcgttttagagctatgctgttttg

SEQ ID NO: 1911 - DNA, 74 bp, Artificial Sequence
  Description of Artificial Sequence: Synthetic oligonucleotide
gaaattaatacgactcactatagggatgaatacttgtgagtacagagaataagttttagagctatgctgttttg

SEQ ID NO: 1912 - DNA, 74 bp, Artificial Sequence
  Description of Artificial Sequence: Synthetic oligonucleotide
gaaattaatacgactcactatagggatgaataacagatgcaaactttagagcgttttagagctatgctgttttg

SEQ ID NO: 1913 - DNA, 74 bp, Artificial Sequence
  Description of Artificial Sequence: Synthetic oligonucleotide
gaaattaatacgactcactatagggatgaataaaaaaatatccaagaaaggcgttttagagctatgctgttttg

SEQ ID NO: 1914 - DNA, 74 bp, Artificial Sequence
  Description of Artificial Sequence: Synthetic oligonucleotide
gaaattaatacgactcactatagggatgaatatgtgtgaagccttgagaaccgttttagagctatgctgttttg

SEQ ID NO: 1915 - DNA, 74 bp, Artificial Sequence
  Description of Artificial Sequence: Synthetic oligonucleotide
gaaattaatacgactcactatagggatgaataatgtattcaaggaacagcaggttttagagctatgctgttttg

SEQ ID NO: 1916 - DNA, 74 bp, Artificial Sequence
  Description of Artificial Sequence: Synthetic oligonucleotide
gaaattaatacgactcactatagggatgaataaaaatggggataagaaatccgttttagagctatgctgttttg

SEQ ID NO: 1917 - DNA, 74 bp, Artificial Sequence
  Description of Artificial Sequence: Synthetic oligonucleotide
gaaattaatacgactcactatagggatgaataagagccccttagtaaaataagttttagagctatgctgttttg

SEQ ID NO: 1918 - DNA, 74 bp, Artificial Sequence
  Description of Artificial Sequence: Synthetic oligonucleotide
gaaattaatacgactcactatagggatgaatagtaagtgatggccaaccgccgttttagagctatgctgttttg

SEQ ID NO: 1919 - DNA, 74 bp, Artificial Sequence
  Description of Artificial Sequence: Synthetic oligonucleotide
gaaattaatacgactcactatagggatgaataactgtgccattagacagcaagttttagagctatgctgttttg

SEQ ID NO: 1920 - DNA, 74 bp, Artificial Sequence
  Description of Artificial Sequence: Synthetic oligonucleotide
gaaattaatacgactcactatagggatgaatatttgggcaaagcccacaggggttttagagctatgctgttttg

SEQ ID NO: 1921 - DNA, 74 bp, Artificial Sequence
  Description of Artificial Sequence: Synthetic oligonucleotide
gaaattaatacgactcactatagggatgaatataagtgtaaatgaatcagaagttttagagctatgctgttttg

SEQ ID NO: 1922 - DNA, 74 bp, Artificial Sequence
  Description of Artificial Sequence: Synthetic oligonucleotide
gaaattaatacgactcactatagggatgaatacttgtttcaaagagaagggggttttagagctatgctgttttg

SEQ ID NO: 1923 - DNA, 74 bp, Artificial Sequence
  Description of Artificial Sequence: Synthetic oligonucleotide
gaaattaatacgactcactatagggatgaataagtcatgaggctttgggacagttttagagctatgctgttttg

SEQ ID NO: 1924 - DNA, 74 bp, Artificial Sequence
  Description of Artificial Sequence: Synthetic oligonucleotide
gaaattaatacgactcactatagggatgaatataaaaattttggtcttagaagttttagagctatgctgttttg

SEQ ID NO: 1925 - DNA, 74 bp, Artificial Sequence
  Description of Artificial Sequence: Synthetic oligonucleotide
gaaattaatacgactcactatagggatgaatacaataaggaaaaagatgtgagttttagagctatgctgttttg

SEQ ID NO: 1926 - DNA, 74 bp, Artificial Sequence
  Description of Artificial Sequence: Synthetic oligonucleotide
gaaattaatacgactcactatagggatgaatatgaaggtaagaaaaaagccagttttagagctatgctgttttg

SEQ ID NO: 1927 - DNA, 74 bp, Artificial Sequence
  Description of Artificial Sequence: Synthetic oligonucleotide
gaaattaatacgactcactatagggatgaataaaatctgaaactcaaggtaagttttagagctatgctgttttg

SEQ ID NO: 1928 - DNA, 74 bp, Artificial Sequence
  Description of Artificial Sequence: Synthetic oligonucleotide
gaaattaatacgactcactatagggatgaatatgattaatactgtgaggaaggttttagagctatgctgttttg

SEQ ID NO: 1929 - DNA, 74 bp, Artificial Sequence
  Description of Artificial Sequence: Synthetic oligonucleotide
gaaattaatacgactcactatagggatgaatagaattgacaggaacttctaagttttagagctatgctgttttg

SEQ ID NO: 1930 - DNA, 74 bp, Artificial Sequence
  Description of Artificial Sequence: Synthetic oligonucleotide
gaaattaatacgactcactatagggatgaatacgaagtataatgtagacaaggttttagagctatgctgttttg

SEQ ID NO: 1931 - DNA, 74 bp, Artificial Sequence
  Description of Artificial Sequence: Synthetic oligonucleotide
gaaattaatacgactcactatagggatgaatagttatctcctagttgaggcagttttagagctatgctgttttg

SEQ ID NO: 1932 - DNA, 74 bp, Artificial Sequence
  Description of Artificial Sequence: Synthetic oligonucleotide
gaaattaatacgactcactatagggatgaatagctcccatctggcacaaggagttttagagctatgctgttttg

SEQ ID NO: 1933 - DNA, 74 bp, Artificial Sequence
  Description of Artificial Sequence: Synthetic oligonucleotide
gaaattaatacgactcactatagggatgaatattgcccaacatggattgaaagttttagagctatgctgttttg

SEQ ID NO: 1934 - DNA, 74 bp, Artificial Sequence
  Description of Artificial Sequence: Synthetic oligonucleotide
gaaattaatacgactcactatagggatgaatactggaggtgtaggcacatgagttttagagctatgctgttttg

SEQ ID NO: 1935 - DNA, 74 bp, Artificial Sequence
  Description of Artificial Sequence: Synthetic oligonucleotide
gaaattaatacgactcactatagggatgaatatagcctttaccagggcagccgttttagagctatgctgttttg

SEQ ID NO: 1936 - DNA, 74 bp, Artificial Sequence
  Description of Artificial Sequence: Synthetic oligonucleotide
gaaattaatacgactcactatagggatgaataatgggataaggggtgggaacgttttagagctatgctgttttg

SEQ ID NO: 1937 - DNA, 74 bp, Artificial Sequence
  Description of Artificial Sequence: Synthetic oligonucleotide
gaaattaatacgactcactatagggatgaataaaggtgtaataactgagtccgttttagagctatgctgttttg

SEQ ID NO: 1938 - DNA, 74 bp, Artificial Sequence
  Description of Artificial Sequence: Synthetic oligonucleotide
gaaattaatacgactcactatagggatgaataaggaggtgtgaggctgaaccgttttagagctatgctgttttg

SEQ ID NO: 1939 - DNA, 74 bp, Artificial Sequence
  Description of Artificial Sequence: Synthetic oligonucleotide
gaaattaatacgactcactatagggatgaatactaacctaacagggaaatgggttttagagctatgctgttttg

SEQ ID NO: 1940 - DNA, 74 bp, Artificial Sequence
  Description of Artificial Sequence: Synthetic oligonucleotide
gaaattaatacgactcactatagggatgaatacatttcacattgaaaggggcgttttagagctatgctgttttg

SEQ ID NO: 1941 - DNA, 74 bp, Artificial Sequence
  Description of Artificial Sequence: Synthetic oligonucleotide
gaaattaatacgactcactatagggatgaatagatggaggtaagtattaggggttttagagctatgctgttttg

SEQ ID NO: 1942 - DNA, 74 bp, Artificial Sequence
  Description of Artificial Sequence: Synthetic oligonucleotide
gaaattaatacgactcactatagggatgaatatgtgtggagggaatgagtgagttttagagctatgctgttttg

SEQ ID NO: 1943 - DNA, 74 bp, Artificial Sequence
  Description of Artificial Sequence: Synthetic oligonucleotide
gaaattaatacgactcactatagggatgaatagagtaaccatggttggggaagttttagagctatgctgttttg

SEQ ID NO: 1944 - DNA, 74 bp, Artificial Sequence
  Description of Artificial Sequence: Synthetic oligonucleotide
gaaattaatacgactcactatagggatgaatatgactcgagaacaagaatgggttttagagctatgctgttttg

SEQ ID NO: 1945 - DNA, 74 bp, Artificial Sequence
  Description of Artificial Sequence: Synthetic oligonucleotide
gaaattaatacgactcactatagggatgaataaatccaaccttggtccaagagttttagagctatgctgttttg

SEQ ID NO: 1946 - DNA, 74 bp, Artificial Sequence
  Description of Artificial Sequence: Synthetic oligonucleotide
gaaattaatacgactcactatagggatgaatacagtcactgatctcacctacgttttagagctatgctgttttg

SEQ ID NO: 1947 - DNA, 74 bp, Artificial Sequence
  Description of Artificial Sequence: Synthetic oligonucleotide
gaaattaatacgactcactatagggatgaatacaaggtttgtctggttgcgagttttagagctatgctgttttg

SEQ ID NO: 1948 - DNA, 74 bp, Artificial Sequence
  Description of Artificial Sequence: Synthetic oligonucleotide
gaaattaatacgactcactatagggatgaatacaggcaggtcattttaaaaagttttagagctatgctgttttg

SEQ ID NO: 1949 - DNA, 74 bp, Artificial Sequence
  Description of Artificial Sequence: Synthetic oligonucleotide
gaaattaatacgactcactatagggatgaatacaatctactcatctgacaaagttttagagctatgctgttttg

SEQ ID NO: 1950 - DNA, 74 bp, Artificial Sequence
  Description of Artificial Sequence: Synthetic oligonucleotide
gaaattaatacgactcactatagggatgaatatttataaaaggacaaaacaagttttagagctatgctgttttg

SEQ ID NO: 1951 - DNA, 74 bp, Artificial Sequence
  Description of Artificial Sequence: Synthetic oligonucleotide
gaaattaatacgactcactatagggatgaataaatgacaaaactgtagaaacgttttagagctatgctgttttg

SEQ ID NO: 1952 - DNA, 74 bp, Artificial Sequence
  Description of Artificial Sequence: Synthetic oligonucleotide
gaaattaatacgactcactatagggatgaatacttccagaaaaataggaagagttttagagctatgctgttttg

SEQ ID NO: 1953 - DNA, 74 bp, Artificial Sequence
  Description of Artificial Sequence: Synthetic oligonucleotide
gaaattaatacgactcactatagggatgaataatttgataactgagaagaaagttttagagctatgctgttttg

SEQ ID NO: 1954 - DNA, 74 bp, Artificial Sequence
  Description of Artificial Sequence: Synthetic oligonucleotide
gaaattaatacgactcactatagggatgaataggagggtgagagagtggtaagttttagagctatgctgttttg

SEQ ID NO: 1955 - DNA, 74 bp, Artificial Sequence
  Description of Artificial Sequence: Synthetic oligonucleotide
gaaattaatacgactcactatagggatgaatatcacaggctaaacctaaacagttttagagctatgctgttttg

SEQ ID NO: 1956 - DNA, 74 bp, Artificial Sequence
  Description of Artificial Sequence: Synthetic oligonucleotide
gaaattaatacgactcactatagggatgaataactagagtggggaacactgggttttagagctatgctgttttg

SEQ ID NO: 1957 - DNA, 74 bp, Artificial Sequence
  Description of Artificial Sequence: Synthetic oligonucleotide
gaaattaatacgactcactatagggatgaatacattcctctcctaaatcaaagttttagagctatgctgttttg

SEQ ID NO: 1958 - DNA, 74 bp, Artificial Sequence
  Description of Artificial Sequence: Synthetic oligonucleotide
gaaattaatacgactcactatagggatgaatagaagatgagttggtttagaagttttagagctatgctgttttg

SEQ ID NO: 1959 - DNA, 74 bp, Artificial Sequence
  Description of Artificial Sequence: Synthetic oligonucleotide
gaaattaatacgactcactatagggatgaatagtgagtaattaagaaagggcgttttagagctatgctgttttg

SEQ ID NO: 1960 - DNA, 74 bp, Artificial Sequence
  Description of Artificial Sequence: Synthetic oligonucleotide
gaaattaatacgactcactatagggatgaataagatgttttccccagggggcgttttagagctatgctgttttg

SEQ ID NO: 1961 - DNA, 74 bp, Artificial Sequence
  Description of Artificial Sequence: Synthetic oligonucleotide
gaaattaatacgactcactatagggatgaatatttgagtatgatttcactaagttttagagctatgctgttttg

SEQ ID NO: 1962 - DNA, 74 bp, Artificial Sequence
  Description of Artificial Sequence: Synthetic oligonucleotide
gaaattaatacgactcactatagggatgaatagaagtctcaactatttgtaggttttagagctatgctgttttg

SEQ ID NO: 1963 - DNA, 74 bp, Artificial Sequence
  Description of Artificial Sequence: Synthetic oligonucleotide
gaaattaatacgactcactatagggatgaatatttattactgttcaggaggcgttttagagctatgctgttttg

SEQ ID NO: 1964 - DNA, 74 bp, Artificial Sequence
  Description of Artificial Sequence: Synthetic oligonucleotide
gaaattaatacgactcactatagggatgaatataactgcatctcaaacataagttttagagctatgctgttttg

SEQ ID NO: 1965 - DNA, 74 bp, Artificial Sequence
  Description of Artificial Sequence: Synthetic oligonucleotide
gaaattaatacgactcactatagggatgaatatttttactccatcattctaagttttagagctatgctgttttg

SEQ ID NO: 1966 - DNA, 74 bp, Artificial Sequence
  Description of Artificial Sequence: Synthetic oligonucleotide
gaaattaatacgactcactatagggatgaatatatgtaggtaggtgctatgcgttttagagctatgctgttttg

SEQ ID NO: 1967 - DNA, 74 bp, Artificial Sequence
  Description of Artificial Sequence: Synthetic oligonucleotide
gaaattaatacgactcactatagggatgaataatgtgcactggtgttggtgggttttagagctatgctgttttg

SEQ ID NO: 1968 - DNA, 74 bp, Artificial Sequence
  Description of Artificial Sequence: Synthetic oligonucleotide
gaaattaatacgactcactatagggatgaataaggcccctggacagccaacagttttagagctatgctgttttg

SEQ ID NO: 1969 - DNA, 74 bp, Artificial Sequence
  Description of Artificial Sequence: Synthetic oligonucleotide
gaaattaatacgactcactatagggatgaatacatttctattcttggggcccgttttagagctatgctgttttg

SEQ ID NO: 1970 - DNA, 74 bp, Artificial Sequence
  Description of Artificial Sequence: Synthetic oligonucleotide
gaaattaatacgactcactatagggatgaatacaatcagcatcttgggcacagttttagagctatgctgttttg

SEQ ID NO: 1971 - DNA, 74 bp, Artificial Sequence
  Description of Artificial Sequence: Synthetic oligonucleotide
gaaattaatacgactcactatagggatgaataaaattcaaaatcttgtatacgttttagagctatgctgttttg

SEQ ID NO: 1972 - DNA, 74 bp, Artificial Sequence
  Description of Artificial Sequence: Synthetic oligonucleotide
gaaattaatacgactcactatagggatgaataattaaatctcaccgaagcccgttttagagctatgctgttttg

SEQ ID NO: 1973 - DNA, 74 bp, Artificial Sequence
  Description of Artificial Sequence: Synthetic oligonucleotide
gaaattaatacgactcactatagggatgaataagaggaaactatcaccctaagttttagagctatgctgttttg

SEQ ID NO: 1974 - DNA, 74 bp, Artificial Sequence
  Description of Artificial Sequence: Synthetic oligonucleotide
gaaattaatacgactcactatagggatgaatattgatgctaggctcaggcaggttttagagctatgctgttttg

SEQ ID NO: 1975 - DNA, 74 bp, Artificial Sequence
  Description of Artificial Sequence: Synthetic oligonucleotide
gaaattaatacgactcactatagggatgaatatgggtcacgcatattggcccgttttagagctatgctgttttg

SEQ ID NO: 1976 - DNA, 74 bp, Artificial Sequence
  Description of Artificial Sequence: Synthetic oligonucleotide
gaaattaatacgactcactatagggatgaatatgaaatgtgctgctgcctgcgttttagagctatgctgttttg

SEQ ID NO: 1977 - DNA, 74 bp, Artificial Sequence
  Description of Artificial Sequence: Synthetic oligonucleotide
gaaattaatacgactcactatagggatgaatactgccttgctgggaatcccagttttagagctatgctgttttg

SEQ ID NO: 1978 - DNA, 74 bp, Artificial Sequence
  Description of Artificial Sequence: Synthetic oligonucleotide
gaaattaatacgactcactatagggatgaatacttgtgagataatgtggaaggttttagagctatgctgttttg

SEQ ID NO: 1979 - DNA, 74 bp, Artificial Sequence
  Description of Artificial Sequence: Synthetic oligonucleotide
gaaattaatacgactcactatagggatgaataagtcaactgaactgtggagggttttagagctatgctgttttg

SEQ ID NO: 1980 - DNA, 74 bp, Artificial Sequence
  Description of Artificial Sequence: Synthetic oligonucleotide
gaaattaatacgactcactatagggatgaatagcaagtgtgctgtgttgtgggttttagagctatgctgttttg

SEQ ID NO: 1981 - DNA, 74 bp, Artificial Sequence
  Description of Artificial Sequence: Synthetic oligonucleotide
gaaattaatacgactcactatagggatgaataaatgggggatgatgatgaaggttttagagctatgctgttttg

SEQ ID NO: 1982 - DNA, 74 bp, Artificial Sequence
  Description of Artificial Sequence: Synthetic oligonucleotide
gaaattaatacgactcactatagggatgaataagaaaaggttcatgacctcagttttagagctatgctgttttg

SEQ ID NO: 1983 - DNA, 74 bp, Artificial Sequence
  Description of Artificial Sequence: Synthetic oligonucleotide
gaaattaatacgactcactatagggatgaataaaaccctaaatgtggtgtgagttttagagctatgctgttttg

SEQ ID NO: 1984 - DNA, 74 bp, Artificial Sequence
  Description of Artificial Sequence: Synthetic oligonucleotide
gaaattaatacgactcactatagggatgaataggtgtaggttaaaaagatgagttttagagctatgctgttttg

SEQ ID NO: 1985 - DNA, 74 bp, Artificial Sequence
  Description of Artificial Sequence: Synthetic oligonucleotide
gaaattaatacgactcactatagggatgaataataaactgaagggaagaggcgttttagagctatgctgttttg

SEQ ID NO: 1986 - DNA, 74 bp, Artificial Sequence
  Description of Artificial Sequence: Synthetic oligonucleotide
gaaattaatacgactcactatagggatgaataagtattgggtagttctgccagttttagagctatgctgttttg

SEQ ID NO: 1987 - DNA, 74 bp, Artificial Sequence
  Description of Artificial Sequence: Synthetic oligonucleotide
gaaattaatacgactcactatagggatgaatatttgttctactaggaccagggttttagagctatgctgttttg

SEQ ID NO: 1988 - DNA, 74 bp, Artificial Sequence
  Description of Artificial Sequence: Synthetic oligonucleotide
gaaattaatacgactcactatagggatgaatagagaaaacatatgcaagtgagttttagagctatgctgttttg

SEQ ID NO: 1989 - DNA, 74 bp, Artificial Sequence
  Description of Artificial Sequence: Synthetic oligonucleotide
gaaattaatacgactcactatagggatgaatataaaacaaacaggccgggcagttttagagctatgctgttttg

SEQ ID NO: 1990 - DNA, 74 bp, Artificial Sequence
  Description of Artificial Sequence: Synthetic oligonucleotide
gaaattaatacgactcactatagggatgaatagagttgtttatttggtaacagttttagagctatgctgttttg

SEQ ID NO: 1991 - DNA, 74 bp, Artificial Sequence
  Description of Artificial Sequence: Synthetic oligonucleotide
gaaattaatacgactcactatagggatgaataattcccttttagtacaccgagttttagagctatgctgttttg

SEQ ID NO: 1992 - DNA, 74 bp, Artificial Sequence
  Description of Artificial Sequence: Synthetic oligonucleotide
gaaattaatacgactcactatagggatgaataggagacagcaacaaaactgggttttagagctatgctgttttg

SEQ ID NO: 1993 - DNA, 74 bp, Artificial Sequence
  Description of Artificial Sequence: Synthetic oligonucleotide
gaaattaatacgactcactatagggatgaataattctagaatattccaatgcgttttagagctatgctgttttg

SEQ ID NO: 1994 - DNA, 74 bp, Artificial Sequence
  Description of Artificial Sequence: Synthetic oligonucleotide
gaaattaatacgactcactatagggatgaatatgtgactaaggatcacatacgttttagagctatgctgttttg

SEQ ID NO: 1995 - DNA, 74 bp, Artificial Sequence
  Description of Artificial Sequence: Synthetic oligonucleotide
gaaattaatacgactcactatagggatgaatatttgacaatccttaaaagaagttttagagctatgctgttttg

SEQ ID NO: 1996 - DNA, 74 bp, Artificial Sequence
  Description of Artificial Sequence: Synthetic oligonucleotide
gaaattaatacgactcactatagggatgaatatatgaatatatttacaagcagttttagagctatgctgttttg

SEQ ID NO: 1997 - DNA, 74 bp, Artificial Sequence
  Description of Artificial Sequence: Synthetic oligonucleotide
gaaattaatacgactcactatagggatgaatacctgccatggatcagtatgcgttttagagctatgctgttttg

SEQ ID NO: 1998 - DNA, 74 bp, Artificial Sequence
  Description of Artificial Sequence: Synthetic oligonucleotide
gaaattaatacgactcactatagggatgaatatggagggtgggagaagggaagttttagagctatgctgttttg

SEQ ID NO: 1999 - DNA, 74 bp, Artificial Sequence
  Description of Artificial Sequence: Synthetic oligonucleotide
gaaattaatacgactcactatagggatgaatatagtaagtaccacattatgcgttttagagctatgctgttttg

SEQ ID NO: 2000 - DNA, 74 bp, Artificial Sequence
  Description of Artificial Sequence: Synthetic oligonucleotide
gaaattaatacgactcactatagggatgaatacctacatggatttttagtcagttttagagctatgctgttttg

SEQ ID NO: 2001 - DNA, 74 bp, Artificial Sequence
  Description of Artificial Sequence: Synthetic oligonucleotide
gaaattaatacgactcactatagggatgaataacaggtgacctcagtggagggttttagagctatgctgttttg

SEQ ID NO: 2002 - DNA, 74 bp, Artificial Sequence
  Description of Artificial Sequence: Synthetic oligonucleotide
gaaattaatacgactcactatagggatgaataggtcttgaaagacacagggggttttagagctatgctgttttg

SEQ ID NO: 2003 - DNA, 74 bp, Artificial Sequence
  Description of Artificial Sequence: Synthetic oligonucleotide
gaaattaatacgactcactatagggatgaatactatggtgagaaaggccaaagttttagagctatgctgttttg

SEQ ID NO: 2004 - DNA, 74 bp, Artificial Sequence
  Description of Artificial Sequence: Synthetic oligonucleotide
gaaattaatacgactcactatagggatgaatataagcagtagtccacagtgcgttttagagctatgctgttttg

SEQ ID NO: 2005 - DNA, 74 bp, Artificial Sequence
  Description of Artificial Sequence: Synthetic oligonucleotide
gaaattaatacgactcactatagggatgaataggactgagagactgtagagagttttagagctatgctgttttg

SEQ ID NO: 2006 - DNA, 74 bp, Artificial Sequence
  Description of Artificial Sequence: Synthetic oligonucleotide
gaaattaatacgactcactatagggatgaatattgaaagtccccagcagtgggttttagagctatgctgttttg

SEQ ID NO: 2007 - DNA, 74 bp, Artificial Sequence
  Description of Artificial Sequence: Synthetic oligonucleotide
gaaattaatacgactcactatagggatgaatatggggtagaaggacaacacagttttagagctatgctgttttg

SEQ ID NO: 2008 - DNA, 74 bp, Artificial Sequence
  Description of Artificial Sequence: Synthetic oligonucleotide
gaaattaatacgactcactatagggatgaataattccctaaccaaggcccaagttttagagctatgctgttttg

SEQ ID NO: 2009 - DNA, 74 bp, Artificial Sequence
  Description of Artificial Sequence: Synthetic oligonucleotide
gaaattaatacgactcactatagggatgaataaggaaaatttcccaaaagaagttttagagctatgctgttttg

SEQ ID NO: 2010 - DNA, 74 bp, Artificial Sequence
  Description of Artificial Sequence: Synthetic oligonucleotide
gaaattaatacgactcactatagggatgaataaaagctagttgcaaaggggcgttttagagctatgctgttttg

SEQ ID NO: 2011 - DNA, 74 bp, Artificial Sequence
  Description of Artificial Sequence: Synthetic oligonucleotide
gaaattaatacgactcactatagggatgaatagtgagaacagtgcattaggagttttagagctatgctgttttg

SEQ ID NO: 2012 - DNA, 74 bp, Artificial Sequence
  Description of Artificial Sequence: Synthetic oligonucleotide
gaaattaatacgactcactatagggatgaataaaatatgaaaatggaagagggttttagagctatgctgttttg

SEQ ID NO: 2013 - DNA, 74 bp, Artificial Sequence
  Description of Artificial Sequence: Synthetic oligonucleotide
gaaattaatacgactcactatagggatgaatagtacaattactaagaaaggcgttttagagctatgctgttttg

SEQ ID NO: 2014 - DNA, 74 bp, Artificial Sequence
  Description of Artificial Sequence: Synthetic oligonucleotide
gaaattaatacgactcactatagggatgaatactgcaggtctcttcatgggcgttttagagctatgctgttttg

SEQ ID NO: 2015 - DNA, 74 bp, Artificial Sequence
  Description of Artificial Sequence: Synthetic oligonucleotide
gaaattaatacgactcactatagggatgaatagaggcactggagccaaataagttttagagctatgctgttttg

SEQ ID NO: 2016 - DNA, 74 bp, Artificial Sequence
  Description of Artificial Sequence: Synthetic oligonucleotide
gaaattaatacgactcactatagggatgaatactgtagtctgcagctgagaagttttagagctatgctgttttg

SEQ ID NO: 2017 - DNA, 74 bp, Artificial Sequence
  Description of Artificial Sequence: Synthetic oligonucleotide
gaaattaatacgactcactatagggatgaatatcatcccctcatcgtaataggttttagagctatgctgttttg

SEQ ID NO: 2018 - DNA, 74 bp, Artificial Sequence
  Description of Artificial Sequence: Synthetic oligonucleotide
gaaattaatacgactcactatagggatgaataggatggggtgaggaggaagagttttagagctatgctgttttg

SEQ ID NO: 2019 - DNA, 74 bp, Artificial Sequence
  Description of Artificial Sequence: Synthetic oligonucleotide
gaaattaatacgactcactatagggatgaatactgggacagaaagatgataagttttagagctatgctgttttg

SEQ ID NO: 2020 - DNA, 74 bp, Artificial Sequence
  Description of Artificial Sequence: Synthetic oligonucleotide
gaaattaatacgactcactatagggatgaataggtattttttggtttcaggagttttagagctatgctgttttg

SEQ ID NO: 2021 - DNA, 74 bp, Artificial Sequence
  Description of Artificial Sequence: Synthetic oligonucleotide
gaaattaatacgactcactatagggatgaatatcagaaatgcgtgctcacaggttttagagctatgctgttttg

SEQ ID NO: 2022 - DNA, 74 bp, Artificial Sequence
  Description of Artificial Sequence: Synthetic oligonucleotide
gaaattaatacgactcactatagggatgaatatggagataagatatttaaaggttttagagctatgctgttttg

SEQ ID NO: 2023 - DNA, 74 bp, Artificial Sequence
  Description of Artificial Sequence: Synthetic oligonucleotide
gaaattaatacgactcactatagggatgaatatttaagtaaaagtaaaacccgttttagagctatgctgttttg

SEQ ID NO: 2024 - DNA, 74 bp, Artificial Sequence
  Description of Artificial Sequence: Synthetic oligonucleotide
gaaattaatacgactcactatagggatgaataaaacaactggagctttagacgttttagagctatgctgttttg

SEQ ID NO: 2025 - DNA, 74 bp, Artificial Sequence
  Description of Artificial Sequence: Synthetic oligonucleotide
gaaattaatacgactcactatagggatgaatattggcccccatctttgccccgttttagagctatgctgttttg

SEQ ID NO: 2026 - DNA, 74 bp, Artificial Sequence
  Description of Artificial Sequence: Synthetic oligonucleotide
gaaattaatacgactcactatagggatgaatatgactcagctagggatctgagttttagagctatgctgttttg

SEQ ID NO: 2027 - DNA, 74 bp, Artificial Sequence
  Description of Artificial Sequence: Synthetic oligonucleotide
gaaattaatacgactcactatagggatgaatatatccaaagacgttgtaaacgttttagagctatgctgttttg

SEQ ID NO: 2028 - DNA, 74 bp, Artificial Sequence
  Description of Artificial Sequence: Synthetic oligonucleotide
gaaattaatacgactcactatagggatgaatacaaaggtctctgacatgcgcgttttagagctatgctgttttg

SEQ ID NO: 2029 - DNA, 74 bp, Artificial Sequence
  Description of Artificial Sequence: Synthetic oligonucleotide
gaaattaatacgactcactatagggatgaatattagtcatgactggagaagcgttttagagctatgctgttttg

SEQ ID NO: 2030 - DNA, 74 bp, Artificial Sequence
  Description of Artificial Sequence: Synthetic oligonucleotide
gaaattaatacgactcactatagggatgaataagttaaaacaaaagggaaaggttttagagctatgctgttttg

SEQ ID NO: 2031 - DNA, 74 bp, Artificial Sequence
  Description of Artificial Sequence: Synthetic oligonucleotide
gaaattaatacgactcactatagggatgaataaattggtttggtagatggaagttttagagctatgctgttttg

SEQ ID NO: 2032 - DNA, 74 bp, Artificial Sequence
  Description of Artificial Sequence: Synthetic oligonucleotide
gaaattaatacgactcactatagggatgaatataaggggtataggggggcaagttttagagctatgctgttttg

SEQ ID NO: 2033 - DNA, 74 bp, Artificial Sequence
  Description of Artificial Sequence: Synthetic oligonucleotide
gaaattaatacgactcactatagggatgaatacaaggggccagagatgataagttttagagctatgctgttttg

SEQ ID NO: 2034 - DNA, 74 bp, Artificial Sequence
  Description of Artificial Sequence: Synthetic oligonucleotide
gaaattaatacgactcactatagggatgaataaggatgtgctgatcacaaaggttttagagctatgctgttttg

SEQ ID NO: 2035 - DNA, 74 bp, Artificial Sequence
  Description of Artificial Sequence: Synthetic oligonucleotide
gaaattaatacgactcactatagggatgaataatacttttagggatagcaaagttttagagctatgctgttttg

SEQ ID NO: 2036 - DNA, 74 bp, Artificial Sequence
  Description of Artificial Sequence: Synthetic oligonucleotide
gaaattaatacgactcactatagggatgaataagattccttgggaaaaataggttttagagctatgctgttttg

SEQ ID NO: 2037 - DNA, 74 bp, Artificial Sequence
  Description of Artificial Sequence: Synthetic oligonucleotide
gaaattaatacgactcactatagggatgaatagtggaagcggagcttcctacgttttagagctatgctgttttg

SEQ ID NO: 2038 - DNA, 74 bp, Artificial Sequence
  Description of Artificial Sequence: Synthetic oligonucleotide
gaaattaatacgactcactatagggatgaataccaacaagaggcttgtgaaagttttagagctatgctgttttg

SEQ ID NO: 2039 - DNA, 74 bp, Artificial Sequence
  Description of Artificial Sequence: Synthetic oligonucleotide
gaaattaatacgactcactatagggatgaatagcgtccactaatatcaatgggttttagagctatgctgttttg

SEQ ID NO: 2040 - DNA, 74 bp, Artificial Sequence
  Description of Artificial Sequence: Synthetic oligonucleotide
gaaattaatacgactcactatagggatgaatagagggagtgtgtggccataggttttagagctatgctgttttg

SEQ ID NO: 2041 - DNA, 74 bp, Artificial Sequence
  Description of Artificial Sequence: Synthetic oligonucleotide
gaaattaatacgactcactatagggatgaataactgtacttccacctgctgggttttagagctatgctgttttg

SEQ ID NO: 2042 - DNA, 74 bp, Artificial Sequence
  Description of Artificial Sequence: Synthetic oligonucleotide
gaaattaatacgactcactatagggatgaatagggtgaggtgctggcagggggttttagagctatgctgttttg

SEQ ID NO: 2043 - DNA, 74 bp, Artificial Sequence
  Description of Artificial Sequence: Synthetic oligonucleotide
gaaattaatacgactcactatagggatgaatacattaaaaggaactaaataagttttagagctatgctgttttg

SEQ ID NO: 2044 - DNA, 74 bp, Artificial Sequence
  Description of Artificial Sequence: Synthetic oligonucleotide
gaaattaatacgactcactatagggatgaataaaaataggcacatagaccaagttttagagctatgctgttttg

SEQ ID NO: 2045 - DNA, 74 bp, Artificial Sequence
  Description of Artificial Sequence: Synthetic oligonucleotide
gaaattaatacgactcactatagggatgaataactatgtccattgttgataggttttagagctatgctgttttg

SEQ ID NO: 2046 - DNA, 74 bp, Artificial Sequence
  Description of Artificial Sequence: Synthetic oligonucleotide
gaaattaatacgactcactatagggatgaataaatgaatacagaactgaggagttttagagctatgctgttttg

SEQ ID NO: 2047 - DNA, 74 bp, Artificial Sequence
  Description of Artificial Sequence: Synthetic oligonucleotide
gaaattaatacgactcactatagggatgaataatattcacagcaaataaaaagttttagagctatgctgttttg

SEQ ID NO: 2048 - DNA, 74 bp, Artificial Sequence
  Description of Artificial Sequence: Synthetic oligonucleotide
gaaattaatacgactcactatagggatgaatacatggctttgatatgcagcagttttagagctatgctgttttg

SEQ ID NO: 2049 - DNA, 74 bp, Artificial Sequence
  Description of Artificial Sequence: Synthetic oligonucleotide
gaaattaatacgactcactatagggatgaatacaactttcttagctgcaaaagttttagagctatgctgttttg

SEQ ID NO: 2050 - DNA, 74 bp, Artificial Sequence
  Description of Artificial Sequence: Synthetic oligonucleotide
gaaattaatacgactcactatagggatgaatagatcgctcctgacttcaaaggttttagagctatgctgttttg

SEQ ID NO: 2051 - DNA, 74 bp, Artificial Sequence
  Description of Artificial Sequence: Synthetic oligonucleotide
gaaattaatacgactcactatagggatgaataacagttacagcatgcaacccgttttagagctatgctgttttg

SEQ ID NO: 2052 - DNA, 74 bp, Artificial Sequence
  Description of Artificial Sequence: Synthetic oligonucleotide
gaaattaatacgactcactatagggatgaatacttggcccttccagcacagcgttttagagctatgctgttttg

SEQ ID NO: 2053 - DNA, 74 bp, Artificial Sequence
  Description of Artificial Sequence: Synthetic oligonucleotide
gaaattaatacgactcactatagggatgaataccacatgccactgtggctgcgttttagagctatgctgttttg

SEQ ID NO: 2054 - DNA, 74 bp, Artificial Sequence
  Description of Artificial Sequence: Synthetic oligonucleotide
gaaattaatacgactcactatagggatgaatatatgccacaccactgccaacgttttagagctatgctgttttg

SEQ ID NO: 2055 - DNA, 74 bp, Artificial Sequence
  Description of Artificial Sequence: Synthetic oligonucleotide
gaaattaatacgactcactatagggatgaatatatctccccacaaattgacggttttagagctatgctgttttg

SEQ ID NO: 2056 - DNA, 74 bp, Artificial Sequence
  Description of Artificial Sequence: Synthetic oligonucleotide
gaaattaatacgactcactatagggatgaatatggttatatattcaagctgggttttagagctatgctgttttg

SEQ ID NO: 2057 - DNA, 74 bp, Artificial Sequence
  Description of Artificial Sequence: Synthetic oligonucleotide
gaaattaatacgactcactatagggatgaataatagtatggtcccctgcacagttttagagctatgctgttttg

SEQ ID NO: 2058 - DNA, 74 bp, Artificial Sequence
  Description of Artificial Sequence: Synthetic oligonucleotide
gaaattaatacgactcactatagggatgaatagagctcccagagggagaggcgttttagagctatgctgttttg

SEQ ID NO: 2059 - DNA, 74 bp, Artificial Sequence
  Description of Artificial Sequence: Synthetic oligonucleotide
gaaattaatacgactcactatagggatgaatatggttccaattctcctcacagttttagagctatgctgttttg

SEQ ID NO: 2060 - DNA, 74 bp, Artificial Sequence
  Description of Artificial Sequence: Synthetic oligonucleotide
gaaattaatacgactcactatagggatgaatagtactccagctaccacccacgttttagagctatgctgttttg

SEQ ID NO: 2061 - DNA, 74 bp, Artificial Sequence
  Description of Artificial Sequence: Synthetic oligonucleotide
gaaattaatacgactcactatagggatgaatactgtagccttcaggctctaggttttagagctatgctgttttg

SEQ ID NO: 2062 - DNA, 74 bp, Artificial Sequence
  Description of Artificial Sequence: Synthetic oligonucleotide
gaaattaatacgactcactatagggatgaatagctgagaagcaacagactgcgttttagagctatgctgttttg

SEQ ID NO: 2063 - DNA, 74 bp, Artificial Sequence
  Description of Artificial Sequence: Synthetic oligonucleotide
gaaattaatacgactcactatagggatgaatagcagctgcagctcttgcagcgttttagagctatgctgttttg

SEQ ID NO: 2064 - DNA, 74 bp, Artificial Sequence
  Description of Artificial Sequence: Synthetic oligonucleotide
gaaattaatacgactcactatagggatgaatacctgtgagtccatgacaccagttttagagctatgctgttttg

SEQ ID NO: 2065 - DNA, 74 bp, Artificial Sequence
  Description of Artificial Sequence: Synthetic oligonucleotide
gaaattaatacgactcactatagggatgaataaatgtgcaggggaagggagcgttttagagctatgctgttttg

SEQ ID NO: 2066 - DNA, 74 bp, Artificial Sequence
  Description of Artificial Sequence: Synthetic oligonucleotide
gaaattaatacgactcactatagggatgaatagttcaatagatttttcacaagttttagagctatgctgttttg

SEQ ID NO: 2067 - DNA, 74 bp, Artificial Sequence
  Description of Artificial Sequence: Synthetic oligonucleotide
gaaattaatacgactcactatagggatgaataaatagttttgggaaagcagggttttagagctatgctgttttg

SEQ ID NO: 2068 - DNA, 74 bp, Artificial Sequence
  Description of Artificial Sequence: Synthetic oligonucleotide
gaaattaatacgactcactatagggatgaatagctgtcactgaactccacaggttttagagctatgctgttttg

SEQ ID NO: 2069 - DNA, 74 bp, Artificial Sequence
  Description of Artificial Sequence: Synthetic oligonucleotide
gaaattaatacgactcactatagggatgaatatcagcatttaagcaggagaagttttagagctatgctgttttg

SEQ ID NO: 2070 - DNA, 74 bp, Artificial Sequence
  Description of Artificial Sequence: Synthetic oligonucleotide
gaaattaatacgactcactatagggatgaataaggtccagagtacaaagtaagttttagagctatgctgttttg

SEQ ID NO: 2071 - DNA, 74 bp, Artificial Sequence
  Description of Artificial Sequence: Synthetic oligonucleotide
gaaattaatacgactcactatagggatgaataacagggcatgtctgttctgcgttttagagctatgctgttttg

SEQ ID NO: 2072 - DNA, 74 bp, Artificial Sequence
  Description of Artificial Sequence: Synthetic oligonucleotide
gaaattaatacgactcactatagggatgaatatgggagttgtagaaaggagagttttagagctatgctgttttg

SEQ ID NO: 2073 - DNA, 74 bp, Artificial Sequence
  Description of Artificial Sequence: Synthetic oligonucleotide
gaaattaatacgactcactatagggatgaataagagatgtagtgtgatggcagttttagagctatgctgttttg

SEQ ID NO: 2074 - DNA, 74 bp, Artificial Sequence
  Description of Artificial Sequence: Synthetic oligonucleotide
gaaattaatacgactcactatagggatgaatactaaacaccatacaatacacgttttagagctatgctgttttg

SEQ ID NO: 2075 - DNA, 74 bp, Artificial Sequence
  Description of Artificial Sequence: Synthetic oligonucleotide
gaaattaatacgactcactatagggatgaatatatattaacccactgactccgttttagagctatgctgttttg

SEQ ID NO: 2076 - DNA, 74 bp, Artificial Sequence
  Description of Artificial Sequence: Synthetic oligonucleotide
gaaattaatacgactcactatagggatgaatattgacaagtgagttgtgtccgttttagagctatgctgttttg

SEQ ID NO: 2077 - DNA, 74 bp, Artificial Sequence
  Description of Artificial Sequence: Synthetic oligonucleotide
gaaattaatacgactcactatagggatgaatactttaggctagagcctgtgcgttttagagctatgctgttttg

SEQ ID NO: 2078 - DNA, 74 bp, Artificial Sequence
  Description of Artificial Sequence: Synthetic oligonucleotide
gaaattaatacgactcactatagggatgaataacagtctgagaggatgaagggttttagagctatgctgttttg

SEQ ID NO: 2079 - DNA, 74 bp, Artificial Sequence
  Description of Artificial Sequence: Synthetic oligonucleotide
gaaattaatacgactcactatagggatgaataagaggtgtatatgaggaggcgttttagagctatgctgttttg

SEQ ID NO: 2080 - DNA, 74 bp, Artificial Sequence
  Description of Artificial Sequence: Synthetic oligonucleotide
gaaattaatacgactcactatagggatgaataaaaagaatgagaaaggcccagttttagagctatgctgttttg

SEQ ID NO: 2081 - DNA, 74 bp, Artificial Sequence
  Description of Artificial Sequence: Synthetic oligonucleotide
gaaattaatacgactcactatagggatgaatataaagtgtcaccgttgaggcgttttagagctatgctgttttg

SEQ ID NO: 2082 - DNA, 74 bp, Artificial Sequence
  Description of Artificial Sequence: Synthetic oligonucleotide
gaaattaatacgactcactatagggatgaatagtgcttgggtttctggaagggttttagagctatgctgttttg

SEQ ID NO: 2083 - DNA, 74 bp, Artificial Sequence
  Description of Artificial Sequence: Synthetic oligonucleotide
gaaattaatacgactcactatagggatgaataatgcttagcaattggaatgagttttagagctatgctgttttg

SEQ ID NO: 2084 - DNA, 74 bp, Artificial Sequence
  Description of Artificial Sequence: Synthetic oligonucleotide
gaaattaatacgactcactatagggatgaatactaacccttttccactacccgttttagagctatgctgttttg

SEQ ID NO: 2085 - DNA, 74 bp, Artificial Sequence
  Description of Artificial Sequence: Synthetic oligonucleotide
gaaattaatacgactcactatagggatgaatatggtaaatattctctaagccgttttagagctatgctgttttg

SEQ ID NO: 2086 - DNA, 74 bp, Artificial Sequence
  Description of Artificial Sequence: Synthetic oligonucleotide
gaaattaatacgactcactatagggatgaatacattgtagggtttagagcaggttttagagctatgctgttttg

SEQ ID NO: 2087 - DNA, 74 bp, Artificial Sequence
  Description of Artificial Sequence: Synthetic oligonucleotide
gaaattaatacgactcactatagggatgaataggagtgaggtaagaggacaggttttagagctatgctgttttg

SEQ ID NO: 2088 - DNA, 74 bp, Artificial Sequence
  Description of Artificial Sequence: Synthetic oligonucleotide
gaaattaatacgactcactatagggatgaatattattaagcatatatcataggttttagagctatgctgttttg

SEQ ID NO: 2089 - DNA, 74 bp, Artificial Sequence
  Description of Artificial Sequence: Synthetic oligonucleotide
gaaattaatacgactcactatagggatgaataatggtatctaccttacaagcgttttagagctatgctgttttg

SEQ ID NO: 2090 - DNA, 74 bp, Artificial Sequence
  Description of Artificial Sequence: Synthetic oligonucleotide
gaaattaatacgactcactatagggatgaataacacaaaatccaacataaccgttttagagctatgctgttttg

SEQ ID NO: 2091 - DNA, 74 bp, Artificial Sequence
  Description of Artificial Sequence: Synthetic oligonucleotide
gaaattaatacgactcactatagggatgaatagtatcttgcctcaagaaaccgttttagagctatgctgttttg

SEQ ID NO: 2092 - DNA, 74 bp, Artificial Sequence
  Description of Artificial Sequence: Synthetic oligonucleotide
gaaattaatacgactcactatagggatgaataaggattcagtccttacaccggttttagagctatgctgttttg

SEQ ID NO: 2093 - DNA, 74 bp, Artificial Sequence
  Description of Artificial Sequence: Synthetic oligonucleotide
gaaattaatacgactcactatagggatgaatattggggacaggaactcctccgttttagagctatgctgttttg

SEQ ID NO: 2094 - DNA, 74 bp, Artificial Sequence
  Description of Artificial Sequence: Synthetic oligonucleotide
gaaattaatacgactcactatagggatgaatagcagaaagcggcggggctaggttttagagctatgctgttttg

SEQ ID NO: 2095 - DNA, 74 bp, Artificial Sequence
  Description of Artificial Sequence: Synthetic oligonucleotide
gaaattaatacgactcactatagggatgaataggacaagcgacccgccagccgttttagagctatgctgttttg

SEQ ID NO: 2096 - DNA, 74 bp, Artificial Sequence
  Description of Artificial Sequence: Synthetic oligonucleotide
gaaattaatacgactcactatagggatgaatagagaagtagcggagaagggagttttagagctatgctgttttg

SEQ ID NO: 2097 - DNA, 74 bp, Artificial Sequence
  Description of Artificial Sequence: Synthetic oligonucleotide
gaaattaatacgactcactatagggatgaatatttcttcatggagcagcgaagttttagagctatgctgttttg

SEQ ID NO: 2098 - DNA, 74 bp, Artificial Sequence
  Description of Artificial Sequence: Synthetic oligonucleotide
gaaattaatacgactcactatagggatgaatatttcccatgtgggcaactacgttttagagctatgctgttttg

SEQ ID NO: 2099 - DNA, 74 bp, Artificial Sequence
  Description of Artificial Sequence: Synthetic oligonucleotide
gaaattaatacgactcactatagggatgaataaagcagcagtgcctgaacaagttttagagctatgctgttttg

SEQ ID NO: 2100 - DNA, 74 bp, Artificial Sequence
  Description of Artificial Sequence: Synthetic oligonucleotide
gaaattaatacgactcactatagggatgaatacatcaccagctttgggggcggttttagagctatgctgttttg

SEQ ID NO: 2101 - DNA, 74 bp, Artificial Sequence
  Description of Artificial Sequence: Synthetic oligonucleotide
gaaattaatacgactcactatagggatgaataaagaggttgctttgccgtcggttttagagctatgctgttttg

SEQ ID NO: 2102 - DNA, 74 bp, Artificial Sequence
  Description of Artificial Sequence: Synthetic oligonucleotide
gaaattaatacgactcactatagggatgaatagattcgtttgcgtgtcgggcgttttagagctatgctgttttg

SEQ ID NO: 2103 - DNA, 74 bp, Artificial Sequence
  Description of Artificial Sequence: Synthetic oligonucleotide
gaaattaatacgactcactatagggatgaatacggttaagattaaagtggaagttttagagctatgctgttttg

SEQ ID NO: 2104 - DNA, 74 bp, Artificial Sequence
  Description of Artificial Sequence: Synthetic oligonucleotide
gaaattaatacgactcactatagggatgaatatctctaatgacagggagcgagttttagagctatgctgttttg

SEQ ID NO: 2105 - DNA, 74 bp, Artificial Sequence
  Description of Artificial Sequence: Synthetic oligonucleotide
gaaattaatacgactcactatagggatgaatatgtgccttactcaaccaagcgttttagagctatgctgttttg

SEQ ID NO: 2106 - DNA, 74 bp, Artificial Sequence
  Description of Artificial Sequence: Synthetic oligonucleotide
gaaattaatacgactcactatagggatgaatatgaaaggtgatggcaggtacgttttagagctatgctgttttg

SEQ ID NO: 2107 - DNA, 74 bp, Artificial Sequence
  Description of Artificial Sequence: Synthetic oligonucleotide
gaaattaatacgactcactatagggatgaataacaatatgcaaacagtatgcgttttagagctatgctgttttg

SEQ ID NO: 2108 - DNA, 74 bp, Artificial Sequence
  Description of Artificial Sequence: Synthetic oligonucleotide
gaaattaatacgactcactatagggatgaataaaaaagtctttgagaccaaagttttagagctatgctgttttg

SEQ ID NO: 2109 - DNA, 74 bp, Artificial Sequence
  Description of Artificial Sequence: Synthetic oligonucleotide
gaaattaatacgactcactatagggatgaatacgttggtgagattaagctcagttttagagctatgctgttttg

SEQ ID NO: 2110 - DNA, 74 bp, Artificial Sequence
  Description of Artificial Sequence: Synthetic oligonucleotide
gaaattaatacgactcactatagggatgaataacaacagctatcgtggccaagttttagagctatgctgttttg

SEQ ID NO: 2111 - DNA, 74 bp, Artificial Sequence
  Description of Artificial Sequence: Synthetic oligonucleotide
gaaattaatacgactcactatagggatgaatagataggcagttcagttcacagttttagagctatgctgttttg

SEQ ID NO: 2112 - DNA, 74 bp, Artificial Sequence
  Description of Artificial Sequence: Synthetic oligonucleotide
gaaattaatacgactcactatagggatgaataataccacttccatttgatgagttttagagctatgctgttttg

SEQ ID NO: 2113 - DNA, 74 bp, Artificial Sequence
  Description of Artificial Sequence: Synthetic oligonucleotide
gaaattaatacgactcactatagggatgaatactggatatgttaataggaaagttttagagctatgctgttttg

SEQ ID NO: 2114 - DNA, 74 bp, Artificial Sequence
  Description of Artificial Sequence: Synthetic oligonucleotide
gaaattaatacgactcactatagggatgaataggatatagctaaactgatgagttttagagctatgctgttttg

SEQ ID NO: 2115 - DNA, 74 bp, Artificial Sequence
  Description of Artificial Sequence: Synthetic oligonucleotide
gaaattaatacgactcactatagggatgaatagtgtctggcatttcccctgcgttttagagctatgctgttttg

SEQ ID NO: 2116 - DNA, 74 bp, Artificial Sequence
  Description of Artificial Sequence: Synthetic oligonucleotide
gaaattaatacgactcactatagggatgaatatctcgctgggagctgcagacgttttagagctatgctgttttg

SEQ ID NO: 2117 - DNA, 74 bp, Artificial Sequence
  Description of Artificial Sequence: Synthetic oligonucleotide
gaaattaatacgactcactatagggatgaatactggtggtgtaggctcacaagttttagagctatgctgttttg

SEQ ID NO: 2118 - DNA, 74 bp, Artificial Sequence
  Description of Artificial Sequence: Synthetic oligonucleotide
gaaattaatacgactcactatagggatgaataaaaccctctgggcttgacacgttttagagctatgctgttttg

SEQ ID NO: 2119 - DNA, 74 bp, Artificial Sequence
  Description of Artificial Sequence: Synthetic oligonucleotide
gaaattaatacgactcactatagggatgaataatagaggccagcagaccaaggttttagagctatgctgttttg

SEQ ID NO: 2120 - DNA, 74 bp, Artificial Sequence
  Description of Artificial Sequence: Synthetic oligonucleotide
gaaattaatacgactcactatagggatgaatagcatggtcttttagtgcaaggttttagagctatgctgttttg

SEQ ID NO: 2121 - DNA, 74 bp, Artificial Sequence
  Description of Artificial Sequence: Synthetic oligonucleotide
gaaattaatacgactcactatagggatgaatagtgcacatgcacacaagtgcgttttagagctatgctgttttg

SEQ ID NO: 2122 - DNA, 74 bp, Artificial Sequence
  Description of Artificial Sequence: Synthetic oligonucleotide
gaaattaatacgactcactatagggatgaatacaaaggcagtggaggtacaggttttagagctatgctgttttg

SEQ ID NO: 2123 - DNA, 74 bp, Artificial Sequence
  Description of Artificial Sequence: Synthetic oligonucleotide
gaaattaatacgactcactatagggatgaatatggctgctcatagtaggggagttttagagctatgctgttttg

SEQ ID NO: 2124 - DNA, 74 bp, Artificial Sequence
  Description of Artificial Sequence: Synthetic oligonucleotide
gaaattaatacgactcactatagggatgaatagcatgccattgctctggtgggttttagagctatgctgttttg

SEQ ID NO: 2125 - DNA, 74 bp, Artificial Sequence
  Description of Artificial Sequence: Synthetic oligonucleotide
gaaattaatacgactcactatagggatgaataggaagaatgctagtgggtgcgttttagagctatgctgttttg

SEQ ID NO: 2126 - DNA, 74 bp, Artificial Sequence
  Description of Artificial Sequence: Synthetic oligonucleotide
gaaattaatacgactcactatagggatgaatactttgccccaccaccagcccgttttagagctatgctgttttg

SEQ ID NO: 2127 - DNA, 74 bp, Artificial Sequence
  Description of Artificial Sequence: Synthetic oligonucleotide
gaaattaatacgactcactatagggatgaatactacccccaaacacccacaggttttagagctatgctgttttg

SEQ ID NO: 2128 - DNA, 74 bp, Artificial Sequence
  Description of Artificial Sequence: Synthetic oligonucleotide
gaaattaatacgactcactatagggatgaataccagtggaatactgtgggaagttttagagctatgctgttttg

SEQ ID NO: 2129 - DNA, 74 bp, Artificial Sequence
  Description of Artificial Sequence: Synthetic oligonucleotide
gaaattaatacgactcactatagggatgaatagttttgtgggtgaagagaaagttttagagctatgctgttttg

SEQ ID NO: 2130 - DNA, 74 bp, Artificial Sequence
  Description of Artificial Sequence: Synthetic oligonucleotide
gaaattaatacgactcactatagggatgaatatgaattccgtttgccagggcgttttagagctatgctgttttg

SEQ ID NO: 2131 - DNA, 74 bp, Artificial Sequence
  Description of Artificial Sequence: Synthetic oligonucleotide
gaaattaatacgactcactatagggatgaatacagccaaatagttcagacaggttttagagctatgctgttttg

SEQ ID NO: 2132 - DNA, 74 bp, Artificial Sequence
  Description of Artificial Sequence: Synthetic oligonucleotide
gaaattaatacgactcactatagggatgaatatataaaagtaggagcagtgggttttagagctatgctgttttg

SEQ ID NO: 2133 - DNA, 74 bp, Artificial Sequence
  Description of Artificial Sequence: Synthetic oligonucleotide
gaaattaatacgactcactatagggatgaatacttgaaagttcaggctatgggttttagagctatgctgttttg

SEQ ID NO: 2134 - DNA, 74 bp, Artificial Sequence
  Description of Artificial Sequence: Synthetic oligonucleotide
gaaattaatacgactcactatagggatgaatacaagacactggtagcaacaggttttagagctatgctgttttg

SEQ ID NO: 2135 - DNA, 74 bp, Artificial Sequence
  Description of Artificial Sequence: Synthetic oligonucleotide
gaaattaatacgactcactatagggatgaatatagttcccaggccactgcacgttttagagctatgctgttttg

SEQ ID NO: 2136 - DNA, 74 bp, Artificial Sequence
  Description of Artificial Sequence: Synthetic oligonucleotide
gaaattaatacgactcactatagggatgaatacggcagccagtccatgggaggttttagagctatgctgttttg

SEQ ID NO: 2137 - DNA, 74 bp, Artificial Sequence
  Description of Artificial Sequence: Synthetic oligonucleotide
gaaattaatacgactcactatagggatgaatatcactctggagtaatacaaagttttagagctatgctgttttg

SEQ ID NO: 2138 - DNA, 74 bp, Artificial Sequence
  Description of Artificial Sequence: Synthetic oligonucleotide
gaaattaatacgactcactatagggatgaatacattgttgggtggggccagggttttagagctatgctgttttg

SEQ ID NO: 2139 - DNA, 74 bp, Artificial Sequence
  Description of Artificial Sequence: Synthetic oligonucleotide
gaaattaatacgactcactatagggatgaatagcacattttccttaaccaaagttttagagctatgctgttttg

SEQ ID NO: 2140 - DNA, 74 bp, Artificial Sequence
  Description of Artificial Sequence: Synthetic oligonucleotide
gaaattaatacgactcactatagggatgaatactgaaacccagaaatgggaagttttagagctatgctgttttg

SEQ ID NO: 2141 - DNA, 74 bp, Artificial Sequence
  Description of Artificial Sequence: Synthetic oligonucleotide
gaaattaatacgactcactatagggatgaatatctatcagtaaccctcacaggttttagagctatgctgttttg

SEQ ID NO: 2142 - DNA, 74 bp, Artificial Sequence
  Description of Artificial Sequence: Synthetic oligonucleotide
gaaattaatacgactcactatagggatgaataacactcatctcagaaggtcggttttagagctatgctgttttg

SEQ ID NO: 2143 - DNA, 74 bp, Artificial Sequence
  Description of Artificial Sequence: Synthetic oligonucleotide
gaaattaatacgactcactatagggatgaatacattggtggcattataaaccgttttagagctatgctgttttg

SEQ ID NO: 2144 - DNA, 74 bp, Artificial Sequence
  Description of Artificial Sequence: Synthetic oligonucleotide
gaaattaatacgactcactatagggatgaatacatgggtctgggttaacaacgttttagagctatgctgttttg

SEQ ID NO: 2145 - DNA, 74 bp, Artificial Sequence
  Description of Artificial Sequence: Synthetic oligonucleotide
gaaattaatacgactcactatagggatgaatattgggagtccactgtgctgggttttagagctatgctgttttg

SEQ ID NO: 2146 - DNA, 74 bp, Artificial Sequence
  Description of Artificial Sequence: Synthetic oligonucleotide
gaaattaatacgactcactatagggatgaataacagaagccttacggacaaggttttagagctatgctgttttg

SEQ ID NO: 2147 - DNA, 74 bp, Artificial Sequence
  Description of Artificial Sequence: Synthetic oligonucleotide
gaaattaatacgactcactatagggatgaatatggctccagggttgggacccgttttagagctatgctgttttg

SEQ ID NO: 2148 - DNA, 74 bp, Artificial Sequence
  Description of Artificial Sequence: Synthetic oligonucleotide
gaaattaatacgactcactatagggatgaatagctcagacggcttatgcagcgttttagagctatgctgttttg

SEQ ID NO: 2149 - DNA, 74 bp, Artificial Sequence
  Description of Artificial Sequence: Synthetic oligonucleotide
gaaattaatacgactcactatagggatgaatacatcatcactatgattgcacgttttagagctatgctgttttg

SEQ ID NO: 2150 - DNA, 74 bp, Artificial Sequence
  Description of Artificial Sequence: Synthetic oligonucleotide
gaaattaatacgactcactatagggatgaatatctcctttctgcaaaacaaagttttagagctatgctgttttg

SEQ ID NO: 2151 - DNA, 74 bp, Artificial Sequence
  Description of Artificial Sequence: Synthetic oligonucleotide
gaaattaatacgactcactatagggatgaataaggtgagggataaaatctccgttttagagctatgctgttttg

SEQ ID NO: 2152 - DNA, 74 bp, Artificial Sequence
  Description of Artificial Sequence: Synthetic oligonucleotide
gaaattaatacgactcactatagggatgaatacaggcctccttgagctgcaggttttagagctatgctgttttg

SEQ ID NO: 2153 - DNA, 74 bp, Artificial Sequence
  Description of Artificial Sequence: Synthetic oligonucleotide
gaaattaatacgactcactatagggatgaatagtgggggagaggaaatctccgttttagagctatgctgttttg

SEQ ID NO: 2154 - DNA, 74 bp, Artificial Sequence
  Description of Artificial Sequence: Synthetic oligonucleotide
gaaattaatacgactcactatagggatgaatagcttgtgccagggtgcccaggttttagagctatgctgttttg

SEQ ID NO: 2155 - DNA, 74 bp, Artificial Sequence
  Description of Artificial Sequence: Synthetic oligonucleotide
gaaattaatacgactcactatagggatgaatactgtgtgcttctcagccccagttttagagctatgctgttttg

SEQ ID NO: 2156 - DNA, 74 bp, Artificial Sequence
  Description of Artificial Sequence: Synthetic oligonucleotide
gaaattaatacgactcactatagggatgaatactgtcccgagacctcaggcagttttagagctatgctgttttg

SEQ ID NO: 2157 - DNA, 74 bp, Artificial Sequence
  Description of Artificial Sequence: Synthetic oligonucleotide
gaaattaatacgactcactatagggatgaatactactgggaactccatgccagttttagagctatgctgttttg

SEQ ID NO: 2158 - DNA, 74 bp, Artificial Sequence
  Description of Artificial Sequence: Synthetic oligonucleotide
gaaattaatacgactcactatagggatgaataaggtacctgagttgtggtgggttttagagctatgctgttttg

SEQ ID NO: 2159 - DNA, 74 bp, Artificial Sequence
  Description of Artificial Sequence: Synthetic oligonucleotide
gaaattaatacgactcactatagggatgaataggtggttgtgctggtgccccgttttagagctatgctgttttg

SEQ ID NO: 2160 - DNA, 74 bp, Artificial Sequence
  Description of Artificial Sequence: Synthetic oligonucleotide
gaaattaatacgactcactatagggatgaataactgcagttacaatggaagagttttagagctatgctgttttg

SEQ ID NO: 2161 - DNA, 74 bp, Artificial Sequence
  Description of Artificial Sequence: Synthetic oligonucleotide
gaaattaatacgactcactatagggatgaatatagtggctgtggtgtgctgggttttagagctatgctgttttg

SEQ ID NO: 2162 - DNA, 74 bp, Artificial Sequence
  Description of Artificial Sequence: Synthetic oligonucleotide
gaaattaatacgactcactatagggatgaatacaggctgcacatcagagcccgttttagagctatgctgttttg

SEQ ID NO: 2163 - DNA, 74 bp, Artificial Sequence
  Description of Artificial Sequence: Synthetic oligonucleotide
gaaattaatacgactcactatagggatgaataaaatgtaatggccagtaggagttttagagctatgctgttttg

SEQ ID NO: 2164 - DNA, 74 bp, Artificial Sequence
  Description of Artificial Sequence: Synthetic oligonucleotide
gaaattaatacgactcactatagggatgaataaggaatctatataggggaacgttttagagctatgctgttttg

SEQ ID NO: 2165 - DNA, 74 bp, Artificial Sequence
  Description of Artificial Sequence: Synthetic oligonucleotide
gaaattaatacgactcactatagggatgaataagtctttctccttggtaagggttttagagctatgctgttttg

SEQ ID NO: 2166 - DNA, 74 bp, Artificial Sequence
  Description of Artificial Sequence: Synthetic oligonucleotide
gaaattaatacgactcactatagggatgaatagcttgattgattgccagtccgttttagagctatgctgttttg

SEQ ID NO: 2167 - DNA, 74 bp, Artificial Sequence
  Description of Artificial Sequence: Synthetic oligonucleotide
gaaattaatacgactcactatagggatgaatattaggcacttgagatggaccgttttagagctatgctgttttg

SEQ ID NO: 2168 - DNA, 74 bp, Artificial Sequence
  Description of Artificial Sequence: Synthetic oligonucleotide
gaaattaatacgactcactatagggatgaatacttaatccctggcttaggacgttttagagctatgctgttttg

SEQ ID NO: 2169 - DNA, 74 bp, Artificial Sequence
  Description of Artificial Sequence: Synthetic oligonucleotide
gaaattaatacgactcactatagggatgaatagtgtaaaggttaggaactgcgttttagagctatgctgttttg

SEQ ID NO: 2170 - DNA, 74 bp, Artificial Sequence
  Description of Artificial Sequence: Synthetic oligonucleotide
gaaattaatacgactcactatagggatgaatacctggagagaaagggtgaacgttttagagctatgctgttttg

SEQ ID NO: 2171 - DNA, 74 bp, Artificial Sequence
  Description of Artificial Sequence: Synthetic oligonucleotide
gaaattaatacgactcactatagggatgaataagtaggagtggttaggatgagttttagagctatgctgttttg

SEQ ID NO: 2172 - DNA, 74 bp, Artificial Sequence
  Description of Artificial Sequence: Synthetic oligonucleotide
gaaattaatacgactcactatagggatgaatagtgtttgtgggtgccagtcagttttagagctatgctgttttg

SEQ ID NO: 2173 - DNA, 74 bp, Artificial Sequence
  Description of Artificial Sequence: Synthetic oligonucleotide
gaaattaatacgactcactatagggatgaatagttcatgggcaccagggaaagttttagagctatgctgttttg

SEQ ID NO: 2174 - DNA, 74 bp, Artificial Sequence
  Description of Artificial Sequence: Synthetic oligonucleotide
gaaattaatacgactcactatagggatgaatatgggcctgttcttcatccccgttttagagctatgctgttttg

SEQ ID NO: 2175 - DNA, 74 bp, Artificial Sequence
  Description of Artificial Sequence: Synthetic oligonucleotide
gaaattaatacgactcactatagggatgaataacacttgggccccttgagaggttttagagctatgctgttttg

SEQ ID NO: 2176 - DNA, 74 bp, Artificial Sequence
  Description of Artificial Sequence: Synthetic oligonucleotide
gaaattaatacgactcactatagggatgaataaatgacagtggcaggcagaggttttagagctatgctgttttg

SEQ ID NO: 2177 - DNA, 74 bp, Artificial Sequence
  Description of Artificial Sequence: Synthetic oligonucleotide
gaaattaatacgactcactatagggatgaataactttggttttgatccaagggttttagagctatgctgttttg

SEQ ID NO: 2178 - DNA, 74 bp, Artificial Sequence
  Description of Artificial Sequence: Synthetic oligonucleotide
gaaattaatacgactcactatagggatgaatacatatacagaaaactgaaacgttttagagctatgctgttttg

SEQ ID NO: 2179 - DNA, 74 bp, Artificial Sequence
  Description of Artificial Sequence: Synthetic oligonucleotide
gaaattaatacgactcactatagggatgaatatttcctatttaaaatggtgcgttttagagctatgctgttttg

SEQ ID NO: 2180 - DNA, 74 bp, Artificial Sequence
  Description of Artificial Sequence: Synthetic oligonucleotide
gaaattaatacgactcactatagggatgaatagcaggagaggccaaggacacgttttagagctatgctgttttg

SEQ ID NO: 2181 - DNA, 74 bp, Artificial Sequence
  Description of Artificial Sequence: Synthetic oligonucleotide
gaaattaatacgactcactatagggatgaatacaggtggtccaaatgaagaagttttagagctatgctgttttg

SEQ ID NO: 2182 - DNA, 74 bp, Artificial Sequence
  Description of Artificial Sequence: Synthetic oligonucleotide
gaaattaatacgactcactatagggatgaataactcagccattccagtctgcgttttagagctatgctgttttg

SEQ ID NO: 2183 - DNA, 74 bp, Artificial Sequence
  Description of Artificial Sequence: Synthetic oligonucleotide
gaaattaatacgactcactatagggatgaataagggtccccccatggcacaagttttagagctatgctgttttg

SEQ ID NO: 2184 - DNA, 74 bp, Artificial Sequence
  Description of Artificial Sequence: Synthetic oligonucleotide
gaaattaatacgactcactatagggatgaatacaggcagctttcagggggaggttttagagctatgctgttttg

SEQ ID NO: 2185 - DNA, 74 bp, Artificial Sequence
  Description of Artificial Sequence: Synthetic oligonucleotide
gaaattaatacgactcactatagggatgaatactggctgtggagagtacagagttttagagctatgctgttttg

SEQ ID NO: 2186 - DNA, 74 bp, Artificial Sequence
  Description of Artificial Sequence: Synthetic oligonucleotide
gaaattaatacgactcactatagggatgaataagacaagacataatttcccagttttagagctatgctgttttg

SEQ ID NO: 2187 - DNA, 74 bp, Artificial Sequence
  Description of Artificial Sequence: Synthetic oligonucleotide
gaaattaatacgactcactatagggatgaatatcaggtgcacatagagatgcgttttagagctatgctgttttg

SEQ ID NO: 2188 - DNA, 74 bp, Artificial Sequence
  Description of Artificial Sequence: Synthetic oligonucleotide
gaaattaatacgactcactatagggatgaataccatagagtaaatacgagccgttttagagctatgctgttttg

SEQ ID NO: 2189 - DNA, 74 bp, Artificial Sequence
  Description of Artificial Sequence: Synthetic oligonucleotide
gaaattaatacgactcactatagggatgaatataatcttggctgggttgggggttttagagctatgctgttttg

SEQ ID NO: 2190 - DNA, 74 bp, Artificial Sequence
  Description of Artificial Sequence: Synthetic oligonucleotide
gaaattaatacgactcactatagggatgaatagcagagctcaagcactgtgcgttttagagctatgctgttttg

SEQ ID NO: 2191 - DNA, 74 bp, Artificial Sequence
  Description of Artificial Sequence: Synthetic oligonucleotide
gaaattaatacgactcactatagggatgaatagtgtgtctgtcgacctctgcgttttagagctatgctgttttg

SEQ ID NO: 2192 - DNA, 74 bp, Artificial Sequence
  Description of Artificial Sequence: Synthetic oligonucleotide
gaaattaatacgactcactatagggatgaatactttgcctgggtatcaccaggttttagagctatgctgttttg

SEQ ID NO: 2193 - DNA, 74 bp, Artificial Sequence
  Description of Artificial Sequence: Synthetic oligonucleotide
gaaattaatacgactcactatagggatgaataaaaatccagattacaagagagttttagagctatgctgttttg

SEQ ID NO: 2194 - DNA, 74 bp, Artificial Sequence
  Description of Artificial Sequence: Synthetic oligonucleotide
gaaattaatacgactcactatagggatgaataactggcatgaaccaggaaacgttttagagctatgctgttttg

SEQ ID NO: 2195 - DNA, 74 bp, Artificial Sequence
  Description of Artificial Sequence: Synthetic oligonucleotide
gaaattaatacgactcactatagggatgaataaagatggcagagaggaggcagttttagagctatgctgttttg

SEQ ID NO: 2196 - DNA, 74 bp, Artificial Sequence
  Description of Artificial Sequence: Synthetic oligonucleotide
gaaattaatacgactcactatagggatgaatagcagtgggcaaattgggaacgttttagagctatgctgttttg

SEQ ID NO: 2197 - DNA, 74 bp, Artificial Sequence
  Description of Artificial Sequence: Synthetic oligonucleotide
gaaattaatacgactcactatagggatgaatacctcccagctgcaaaagaaagttttagagctatgctgttttg

SEQ ID NO: 2198 - DNA, 74 bp, Artificial Sequence
  Description of Artificial Sequence: Synthetic oligonucleotide
gaaattaatacgactcactatagggatgaatatcagggaagatagggacagcgttttagagctatgctgttttg

SEQ ID NO: 2199 - DNA, 74 bp, Artificial Sequence
  Description of Artificial Sequence: Synthetic oligonucleotide
gaaattaatacgactcactatagggatgaataggagacgatctgcccactgcgttttagagctatgctgttttg

SEQ ID NO: 2200 - DNA, 74 bp, Artificial Sequence
  Description of Artificial Sequence: Synthetic oligonucleotide
gaaattaatacgactcactatagggatgaatacagctgtggctgcatgctccgttttagagctatgctgttttg

SEQ ID NO: 2201 - DNA, 74 bp, Artificial Sequence
  Description of Artificial Sequence: Synthetic oligonucleotide
gaaattaatacgactcactatagggatgaatacattgcccagccccagacaggttttagagctatgctgttttg

SEQ ID NO: 2202 - DNA, 74 bp, Artificial Sequence
  Description of Artificial Sequence: Synthetic oligonucleotide
gaaattaatacgactcactatagggatgaatagcagggccatgaaccaggcagttttagagctatgctgttttg

SEQ ID NO: 2203 - DNA, 74 bp, Artificial Sequence
  Description of Artificial Sequence: Synthetic oligonucleotide
gaaattaatacgactcactatagggatgaatagtggcacccatttggggaccgttttagagctatgctgttttg

SEQ ID NO: 2204 - DNA, 74 bp, Artificial Sequence
  Description of Artificial Sequence: Synthetic oligonucleotide
gaaattaatacgactcactatagggatgaatacgtgctttaacacagagtgcgttttagagctatgctgttttg

SEQ ID NO: 2205 - DNA, 74 bp, Artificial Sequence
  Description of Artificial Sequence: Synthetic oligonucleotide
gaaattaatacgactcactatagggatgaataactgagttgtctggtgatgcgttttagagctatgctgttttg

SEQ ID NO: 2206 - DNA, 74 bp, Artificial Sequence
  Description of Artificial Sequence: Synthetic oligonucleotide
gaaattaatacgactcactatagggatgaataaggcttagtatgcatcccaggttttagagctatgctgttttg

SEQ ID NO: 2207 - DNA, 74 bp, Artificial Sequence
  Description of Artificial Sequence: Synthetic oligonucleotide
gaaattaatacgactcactatagggatgaatatgaatgaggcctgtggctgcgttttagagctatgctgttttg

SEQ ID NO: 2208 - DNA, 74 bp, Artificial Sequence
  Description of Artificial Sequence: Synthetic oligonucleotide
gaaattaatacgactcactatagggatgaatacagctaagaggcttgtagccgttttagagctatgctgttttg

SEQ ID NO: 2209 - DNA, 74 bp, Artificial Sequence
  Description of Artificial Sequence: Synthetic oligonucleotide
gaaattaatacgactcactatagggatgaatatggtggcttacacgtggtgagttttagagctatgctgttttg

SEQ ID NO: 2210 - DNA, 74 bp, Artificial Sequence
  Description of Artificial Sequence: Synthetic oligonucleotide
gaaattaatacgactcactatagggatgaatatggtttcatgggcccggcccgttttagagctatgctgttttg

SEQ ID NO: 2211 - DNA, 74 bp, Artificial Sequence
  Description of Artificial Sequence: Synthetic oligonucleotide
gaaattaatacgactcactatagggatgaataattgtaacttatgtttaaaagttttagagctatgctgttttg

SEQ ID NO: 2212 - DNA, 74 bp, Artificial Sequence
  Description of Artificial Sequence: Synthetic oligonucleotide
gaaattaatacgactcactatagggatgaataagatgatttagggtatctgggttttagagctatgctgttttg

SEQ ID NO: 2213 - DNA, 74 bp, Artificial Sequence
  Description of Artificial Sequence: Synthetic oligonucleotide
gaaattaatacgactcactatagggatgaatagaaacagcaagcaaacaggagttttagagctatgctgttttg

SEQ ID NO: 2214 - DNA, 74 bp, Artificial Sequence
  Description of Artificial Sequence: Synthetic oligonucleotide
gaaattaatacgactcactatagggatgaatactgaggttctagaattaggagttttagagctatgctgttttg

SEQ ID NO: 2215 - DNA, 74 bp, Artificial Sequence
  Description of Artificial Sequence: Synthetic oligonucleotide
gaaattaatacgactcactatagggatgaatagcatgagcagctcttagtaggttttagagctatgctgttttg

SEQ ID NO: 2216 - DNA, 74 bp, Artificial Sequence
  Description of Artificial Sequence: Synthetic oligonucleotide
gaaattaatacgactcactatagggatgaatatatttagctataaaaaccacgttttagagctatgctgttttg

SEQ ID NO: 2217 - DNA, 74 bp, Artificial Sequence
  Description of Artificial Sequence: Synthetic oligonucleotide
gaaattaatacgactcactatagggatgaataataaaagagatgctttgagagttttagagctatgctgttttg

SEQ ID NO: 2218 - DNA, 74 bp, Artificial Sequence
  Description of Artificial Sequence: Synthetic oligonucleotide
gaaattaatacgactcactatagggatgaatagaggggtgcttagatcagaagttttagagctatgctgttttg

SEQ ID NO: 2219 - DNA, 74 bp, Artificial Sequence
  Description of Artificial Sequence: Synthetic oligonucleotide
gaaattaatacgactcactatagggatgaatatgaactgttgtggtggccacgttttagagctatgctgttttg

SEQ ID NO: 2220 - DNA, 74 bp, Artificial Sequence
  Description of Artificial Sequence: Synthetic oligonucleotide
gaaattaatacgactcactatagggatgaatatagtgggggtaggctgcagggttttagagctatgctgttttg

SEQ ID NO: 2221 - DNA, 74 bp, Artificial Sequence
  Description of Artificial Sequence: Synthetic oligonucleotide
gaaattaatacgactcactatagggatgaatatgtgcctgtgccagctgtgagttttagagctatgctgttttg

SEQ ID NO: 2222 - DNA, 74 bp, Artificial Sequence
  Description of Artificial Sequence: Synthetic oligonucleotide
gaaattaatacgactcactatagggatgaatacgtcaacacttgtggcatgagttttagagctatgctgttttg

SEQ ID NO: 2223 - DNA, 74 bp, Artificial Sequence
  Description of Artificial Sequence: Synthetic oligonucleotide
gaaattaatacgactcactatagggatgaataaattttggggtctggaaggcgttttagagctatgctgttttg

SEQ ID NO: 2224 - DNA, 74 bp, Artificial Sequence
  Description of Artificial Sequence: Synthetic oligonucleotide
gaaattaatacgactcactatagggatgaatagggcacactcatgtgagagggttttagagctatgctgttttg

SEQ ID NO: 2225 - DNA, 74 bp, Artificial Sequence
  Description of Artificial Sequence: Synthetic oligonucleotide
gaaattaatacgactcactatagggatgaataacttgctccagcaccaaccagttttagagctatgctgttttg

SEQ ID NO: 2226 - DNA, 74 bp, Artificial Sequence
  Description of Artificial Sequence: Synthetic oligonucleotide
gaaattaatacgactcactatagggatgaataagaactcactcattaaggcagttttagagctatgctgttttg

SEQ ID NO: 2227 - DNA, 74 bp, Artificial Sequence
  Description of Artificial Sequence: Synthetic oligonucleotide
gaaattaatacgactcactatagggatgaataaaaagcagaatcaagggtgggttttagagctatgctgttttg

SEQ ID NO: 2228 - DNA, 74 bp, Artificial Sequence
  Description of Artificial Sequence: Synthetic oligonucleotide
gaaattaatacgactcactatagggatgaatacagggatctgcatgctgtgcgttttagagctatgctgttttg

SEQ ID NO: 2229 - DNA, 74 bp, Artificial Sequence
  Description of Artificial Sequence: Synthetic oligonucleotide
gaaattaatacgactcactatagggatgaataatgaaaaaaaaaagttataggttttagagctatgctgttttg

SEQ ID NO: 2230 - DNA, 74 bp, Artificial Sequence
  Description of Artificial Sequence: Synthetic oligonucleotide
gaaattaatacgactcactatagggatgaataagggcacaattggaacaaccgttttagagctatgctgttttg

SEQ ID NO: 2231 - DNA, 74 bp, Artificial Sequence
  Description of Artificial Sequence: Synthetic oligonucleotide
gaaattaatacgactcactatagggatgaataacagcaaactggaaacacaagttttagagctatgctgttttg

SEQ ID NO: 2232 - DNA, 74 bp, Artificial Sequence
  Description of Artificial Sequence: Synthetic oligonucleotide
gaaattaatacgactcactatagggatgaataatagaatcctagttctggcagttttagagctatgctgttttg

SEQ ID NO: 2233 - DNA, 74 bp, Artificial Sequence
  Description of Artificial Sequence: Synthetic oligonucleotide
gaaattaatacgactcactatagggatgaataatggtaagcaagcatcaggagttttagagctatgctgttttg

SEQ ID NO: 2234 - DNA, 74 bp, Artificial Sequence
  Description of Artificial Sequence: Synthetic oligonucleotide
gaaattaatacgactcactatagggatgaatatcatccctgggatgcaaggcgttttagagctatgctgttttg

SEQ ID NO: 2235 - DNA, 74 bp, Artificial Sequence
  Description of Artificial Sequence: Synthetic oligonucleotide
gaaattaatacgactcactatagggatgaatatgaaaatctcaataaaatccgttttagagctatgctgttttg

SEQ ID NO: 2236 - DNA, 74 bp, Artificial Sequence
  Description of Artificial Sequence: Synthetic oligonucleotide
gaaattaatacgactcactatagggatgaatatttgttcagtacctgtgtgagttttagagctatgctgttttg

SEQ ID NO: 2237 - DNA, 74 bp, Artificial Sequence
  Description of Artificial Sequence: Synthetic oligonucleotide
gaaattaatacgactcactatagggatgaataaagatggccacagtggaaacgttttagagctatgctgttttg

SEQ ID NO: 2238 - DNA, 74 bp, Artificial Sequence
  Description of Artificial Sequence: Synthetic oligonucleotide
gaaattaatacgactcactatagggatgaataactcattttaaagtgagcaagttttagagctatgctgttttg

SEQ ID NO: 2239 - DNA, 74 bp, Artificial Sequence
  Description of Artificial Sequence: Synthetic oligonucleotide
gaaattaatacgactcactatagggatgaataagtcttcatcctgccgatgcgttttagagctatgctgttttg

SEQ ID NO: 2240 - DNA, 74 bp, Artificial Sequence
  Description of Artificial Sequence: Synthetic oligonucleotide
gaaattaatacgactcactatagggatgaataaagggtgagggcgggtgtgggttttagagctatgctgttttg

SEQ ID NO: 2241 - DNA, 74 bp, Artificial Sequence
  Description of Artificial Sequence: Synthetic oligonucleotide
gaaattaatacgactcactatagggatgaataggaaaaggccatggagaccggttttagagctatgctgttttg

SEQ ID NO: 2242 - DNA, 74 bp, Artificial Sequence
  Description of Artificial Sequence: Synthetic oligonucleotide
gaaattaatacgactcactatagggatgaatatgaaccccttggctgggtgagttttagagctatgctgttttg

SEQ ID NO: 2243 - DNA, 74 bp, Artificial Sequence
  Description of Artificial Sequence: Synthetic oligonucleotide
gaaattaatacgactcactatagggatgaatacttcacagaaaatgttaacagttttagagctatgctgttttg

SEQ ID NO: 2244 - DNA, 74 bp, Artificial Sequence
  Description of Artificial Sequence: Synthetic oligonucleotide
gaaattaatacgactcactatagggatgaataaagggctcatcccctaaggcgttttagagctatgctgttttg

SEQ ID NO: 2245 - DNA, 74 bp, Artificial Sequence
  Description of Artificial Sequence: Synthetic oligonucleotide
gaaattaatacgactcactatagggatgaatacagggtatgtgaggaagagagttttagagctatgctgttttg

SEQ ID NO: 2246 - DNA, 74 bp, Artificial Sequence
  Description of Artificial Sequence: Synthetic oligonucleotide
gaaattaatacgactcactatagggatgaatagttcaggatacattagaaaggttttagagctatgctgttttg

SEQ ID NO: 2247 - DNA, 74 bp, Artificial Sequence
  Description of Artificial Sequence: Synthetic oligonucleotide
gaaattaatacgactcactatagggatgaataaggctgttgtgtgtctgcaagttttagagctatgctgttttg

SEQ ID NO: 2248 - DNA, 74 bp, Artificial Sequence
  Description of Artificial Sequence: Synthetic oligonucleotide
gaaattaatacgactcactatagggatgaatacaacaatgtgacatgggagggttttagagctatgctgttttg

SEQ ID NO: 2249 - DNA, 74 bp, Artificial Sequence
  Description of Artificial Sequence: Synthetic oligonucleotide
gaaattaatacgactcactatagggatgaataccagcagcagtgacacagcagttttagagctatgctgttttg

SEQ ID NO: 2250 - DNA, 74 bp, Artificial Sequence
  Description of Artificial Sequence: Synthetic oligonucleotide
gaaattaatacgactcactatagggatgaatagaagtgttaccacaggggcggttttagagctatgctgttttg

SEQ ID NO: 2251 - DNA, 74 bp, Artificial Sequence
  Description of Artificial Sequence: Synthetic oligonucleotide
gaaattaatacgactcactatagggatgaatagcatctgtttgtgctggtgggttttagagctatgctgttttg

SEQ ID NO: 2252 - DNA, 74 bp, Artificial Sequence
  Description of Artificial Sequence: Synthetic oligonucleotide
gaaattaatacgactcactatagggatgaatagggtcacatgatctgtgtgagttttagagctatgctgttttg

SEQ ID NO: 2253 - DNA, 74 bp, Artificial Sequence
  Description of Artificial Sequence: Synthetic oligonucleotide
gaaattaatacgactcactatagggatgaatatgattgcattgcctcagccagttttagagctatgctgttttg

SEQ ID NO: 2254 - DNA, 74 bp, Artificial Sequence
  Description of Artificial Sequence: Synthetic oligonucleotide
gaaattaatacgactcactatagggatgaataacaatgccattcaccaacgggttttagagctatgctgttttg

SEQ ID NO: 2255 - DNA, 74 bp, Artificial Sequence
  Description of Artificial Sequence: Synthetic oligonucleotide
gaaattaatacgactcactatagggatgaatatcaagtgtgggtacccagaagttttagagctatgctgttttg

SEQ ID NO: 2256 - DNA, 74 bp, Artificial Sequence
  Description of Artificial Sequence: Synthetic oligonucleotide
gaaattaatacgactcactatagggatgaataagtcttgatgagcattgagagttttagagctatgctgttttg

SEQ ID NO: 2257 - DNA, 74 bp, Artificial Sequence
  Description of Artificial Sequence: Synthetic oligonucleotide
gaaattaatacgactcactatagggatgaataccaatggtaatctgttagccgttttagagctatgctgttttg

SEQ ID NO: 2258 - DNA, 74 bp, Artificial Sequence
  Description of Artificial Sequence: Synthetic oligonucleotide
gaaattaatacgactcactatagggatgaatagggaataaatcacaacacaggttttagagctatgctgttttg

SEQ ID NO: 2259 - DNA, 74 bp, Artificial Sequence
  Description of Artificial Sequence: Synthetic oligonucleotide
gaaattaatacgactcactatagggatgaatactacaactggtttgcacagagttttagagctatgctgttttg

SEQ ID NO: 2260 - DNA, 74 bp, Artificial Sequence
  Description of Artificial Sequence: Synthetic oligonucleotide
gaaattaatacgactcactatagggatgaatagataaaggaaaattcaagaagttttagagctatgctgttttg

SEQ ID NO: 2261 - DNA, 74 bp, Artificial Sequence
  Description of Artificial Sequence: Synthetic oligonucleotide
gaaattaatacgactcactatagggatgaatatctgatgtgtgcatcaagaggttttagagctatgctgttttg

SEQ ID NO: 2262 - DNA, 74 bp, Artificial Sequence
  Description of Artificial Sequence: Synthetic oligonucleotide
gaaattaatacgactcactatagggatgaataaaacacttttttttccaaaagttttagagctatgctgttttg

SEQ ID NO: 2263 - DNA, 74 bp, Artificial Sequence
  Description of Artificial Sequence: Synthetic oligonucleotide
gaaattaatacgactcactatagggatgaatagggggaacttactgccctgagttttagagctatgctgttttg

SEQ ID NO: 2264 - DNA, 74 bp, Artificial Sequence
  Description of Artificial Sequence: Synthetic oligonucleotide
gaaattaatacgactcactatagggatgaatacttttgaaaaggggagggaagttttagagctatgctgttttg

SEQ ID NO: 2265 - DNA, 74 bp, Artificial Sequence
  Description of Artificial Sequence: Synthetic oligonucleotide
gaaattaatacgactcactatagggatgaatatgtagccattaggccaaggagttttagagctatgctgttttg

SEQ ID NO: 2266 - DNA, 74 bp, Artificial Sequence
  Description of Artificial Sequence: Synthetic oligonucleotide
gaaattaatacgactcactatagggatgaatactttcatgggaagttggcaggttttagagctatgctgttttg

SEQ ID NO: 2267 - DNA, 74 bp, Artificial Sequence
  Description of Artificial Sequence: Synthetic oligonucleotide
gaaattaatacgactcactatagggatgaataaggccttgatgttcaggcccgttttagagctatgctgttttg

SEQ ID NO: 2268 - DNA, 74 bp, Artificial Sequence
  Description of Artificial Sequence: Synthetic oligonucleotide
gaaattaatacgactcactatagggatgaatagggagaatgcaacacaccaagttttagagctatgctgttttg

SEQ ID NO: 2269 - DNA, 74 bp, Artificial Sequence
  Description of Artificial Sequence: Synthetic oligonucleotide
gaaattaatacgactcactatagggatgaataaaataggttatgacacccaagttttagagctatgctgttttg

SEQ ID NO: 2270 - DNA, 74 bp, Artificial Sequence
  Description of Artificial Sequence: Synthetic oligonucleotide
gaaattaatacgactcactatagggatgaatatgagttaggcagtataaaaagttttagagctatgctgttttg

SEQ ID NO: 2271 - DNA, 74 bp, Artificial Sequence
  Description of Artificial Sequence: Synthetic oligonucleotide
gaaattaatacgactcactatagggatgaatatataaggaaatacctgagacgttttagagctatgctgttttg

SEQ ID NO: 2272 - DNA, 74 bp, Artificial Sequence
  Description of Artificial Sequence: Synthetic oligonucleotide
gaaattaatacgactcactatagggatgaatatctaaataatgagtaggtaagttttagagctatgctgttttg

SEQ ID NO: 2273 - DNA, 74 bp, Artificial Sequence
  Description of Artificial Sequence: Synthetic oligonucleotide
gaaattaatacgactcactatagggatgaatattgaaaaagttgatttcaaagttttagagctatgctgttttg

SEQ ID NO: 2274 - DNA, 74 bp, Artificial Sequence
  Description of Artificial Sequence: Synthetic oligonucleotide
gaaattaatacgactcactatagggatgaataacatgggtaaatatatatcagttttagagctatgctgttttg

SEQ ID NO: 2275 - DNA, 74 bp, Artificial Sequence
  Description of Artificial Sequence: Synthetic oligonucleotide
gaaattaatacgactcactatagggatgaataaaatgacaaggcataacaaagttttagagctatgctgttttg

SEQ ID NO: 2276 - DNA, 74 bp, Artificial Sequence
  Description of Artificial Sequence: Synthetic oligonucleotide
gaaattaatacgactcactatagggatgaatacttcaaaagttcacaggccagttttagagctatgctgttttg

SEQ ID NO: 2277 - DNA, 74 bp, Artificial Sequence
  Description of Artificial Sequence: Synthetic oligonucleotide
gaaattaatacgactcactatagggatgaataaagatgcctactggagctccgttttagagctatgctgttttg

SEQ ID NO: 2278 - DNA, 74 bp, Artificial Sequence
  Description of Artificial Sequence: Synthetic oligonucleotide
gaaattaatacgactcactatagggatgaatagataagaaagagtggagagcgttttagagctatgctgttttg

SEQ ID NO: 2279 - DNA, 74 bp, Artificial Sequence
  Description of Artificial Sequence: Synthetic oligonucleotide
gaaattaatacgactcactatagggatgaatatatttattttcaaaggagcagttttagagctatgctgttttg

SEQ ID NO: 2280 - DNA, 74 bp, Artificial Sequence
  Description of Artificial Sequence: Synthetic oligonucleotide
gaaattaatacgactcactatagggatgaatacatctgtgttatggttataggttttagagctatgctgttttg

SEQ ID NO: 2281 - DNA, 74 bp, Artificial Sequence
  Description of Artificial Sequence: Synthetic oligonucleotide
gaaattaatacgactcactatagggatgaatagaagcactgttaagtcctcggttttagagctatgctgttttg

SEQ ID NO: 2282 - DNA, 74 bp, Artificial Sequence
  Description of Artificial Sequence: Synthetic oligonucleotide
gaaattaatacgactcactatagggatgaatagtacgagtccacacagcagggttttagagctatgctgttttg

SEQ ID NO: 2283 - DNA, 74 bp, Artificial Sequence
  Description of Artificial Sequence: Synthetic oligonucleotide
gaaattaatacgactcactatagggatgaatatcattgcgtggggtttgggggttttagagctatgctgttttg

SEQ ID NO: 2284 - DNA, 74 bp, Artificial Sequence
  Description of Artificial Sequence: Synthetic oligonucleotide
gaaattaatacgactcactatagggatgaataatgcttcagtctgagtccaagttttagagctatgctgttttg

SEQ ID NO: 2285 - DNA, 74 bp, Artificial Sequence
  Description of Artificial Sequence: Synthetic oligonucleotide
gaaattaatacgactcactatagggatgaataagtccaaaggcctgcgaacggttttagagctatgctgttttg

SEQ ID NO: 2286 - DNA, 74 bp, Artificial Sequence
  Description of Artificial Sequence: Synthetic oligonucleotide
gaaattaatacgactcactatagggatgaataaatttcaagtagttttgtgagttttagagctatgctgttttg

SEQ ID NO: 2287 - DNA, 74 bp, Artificial Sequence
  Description of Artificial Sequence: Synthetic oligonucleotide
gaaattaatacgactcactatagggatgaataatttggaaaggagtgggtcagttttagagctatgctgttttg

SEQ ID NO: 2288 - DNA, 74 bp, Artificial Sequence
  Description of Artificial Sequence: Synthetic oligonucleotide
gaaattaatacgactcactatagggatgaatagatgcccttcacaaagaagcgttttagagctatgctgttttg

SEQ ID NO: 2289 - DNA, 74 bp, Artificial Sequence
  Description of Artificial Sequence: Synthetic oligonucleotide
gaaattaatacgactcactatagggatgaatagtgacatctgtgttccatgggttttagagctatgctgttttg

SEQ ID NO: 2290 - DNA, 74 bp, Artificial Sequence
  Description of Artificial Sequence: Synthetic oligonucleotide
gaaattaatacgactcactatagggatgaatagtggctattagcctaactacgttttagagctatgctgttttg

SEQ ID NO: 2291 - DNA, 74 bp, Artificial Sequence
  Description of Artificial Sequence: Synthetic oligonucleotide
gaaattaatacgactcactatagggatgaataccgaagagcaaatctggtgagttttagagctatgctgttttg

SEQ ID NO: 2292 - DNA, 74 bp, Artificial Sequence
  Description of Artificial Sequence: Synthetic oligonucleotide
gaaattaatacgactcactatagggatgaataccaacctgagagcactgagagttttagagctatgctgttttg

SEQ ID NO: 2293 - DNA, 74 bp, Artificial Sequence
  Description of Artificial Sequence: Synthetic oligonucleotide
gaaattaatacgactcactatagggatgaatatgggacatcctagtgcctcagttttagagctatgctgttttg

SEQ ID NO: 2294 - DNA, 74 bp, Artificial Sequence
  Description of Artificial Sequence: Synthetic oligonucleotide
gaaattaatacgactcactatagggatgaatactttaaacggcttaaaggccgttttagagctatgctgttttg

SEQ ID NO: 2295 - DNA, 74 bp, Artificial Sequence
  Description of Artificial Sequence: Synthetic oligonucleotide
gaaattaatacgactcactatagggatgaatactatgggatcctagatacaggttttagagctatgctgttttg

SEQ ID NO: 2296 - DNA, 74 bp, Artificial Sequence
  Description of Artificial Sequence: Synthetic oligonucleotide
gaaattaatacgactcactatagggatgaataggtggatagaacggttacacgttttagagctatgctgttttg

SEQ ID NO: 2297 - DNA, 74 bp, Artificial Sequence
  Description of Artificial Sequence: Synthetic oligonucleotide
gaaattaatacgactcactatagggatgaatatgatgggggaggggacaagagttttagagctatgctgttttg

SEQ ID NO: 2298 - DNA, 74 bp, Artificial Sequence
  Description of Artificial Sequence: Synthetic oligonucleotide
gaaattaatacgactcactatagggatgaataataccataaacaaacactcagttttagagctatgctgttttg

SEQ ID NO: 2299 - DNA, 74 bp, Artificial Sequence
  Description of Artificial Sequence: Synthetic oligonucleotide
gaaattaatacgactcactatagggatgaataagagttagagcacacagcacgttttagagctatgctgttttg

SEQ ID NO: 2300 - DNA, 74 bp, Artificial Sequence
  Description of Artificial Sequence: Synthetic oligonucleotide
gaaattaatacgactcactatagggatgaataagtgtgagtgccagcagaccgttttagagctatgctgttttg

SEQ ID NO: 2301 - DNA, 74 bp, Artificial Sequence
  Description of Artificial Sequence: Synthetic oligonucleotide
gaaattaatacgactcactatagggatgaataaaatagttaacaagagagcagttttagagctatgctgttttg

SEQ ID NO: 2302 - DNA, 74 bp, Artificial Sequence
  Description of Artificial Sequence: Synthetic oligonucleotide
gaaattaatacgactcactatagggatgaataataggaagcaaaacaggaaagttttagagctatgctgttttg

SEQ ID NO: 2303 - DNA, 74 bp, Artificial Sequence
  Description of Artificial Sequence: Synthetic oligonucleotide
gaaattaatacgactcactatagggatgaatagtacctcttggagcacaagggttttagagctatgctgttttg

SEQ ID NO: 2304 - DNA, 74 bp, Artificial Sequence
  Description of Artificial Sequence: Synthetic oligonucleotide
gaaattaatacgactcactatagggatgaataagaagccacataacagagaagttttagagctatgctgttttg

SEQ ID NO: 2305 - DNA, 74 bp, Artificial Sequence
  Description of Artificial Sequence: Synthetic oligonucleotide
gaaattaatacgactcactatagggatgaatataatgttccttaaggcccaagttttagagctatgctgttttg

SEQ ID NO: 2306 - DNA, 74 bp, Artificial Sequence
  Description of Artificial Sequence: Synthetic oligonucleotide
gaaattaatacgactcactatagggatgaataatactcgtgtttccttgtacgttttagagctatgctgttttg

SEQ ID NO: 2307 - DNA, 74 bp, Artificial Sequence
  Description of Artificial Sequence: Synthetic oligonucleotide
gaaattaatacgactcactatagggatgaatatctttccccttagaatggccgttttagagctatgctgttttg

SEQ ID NO: 2308 - DNA, 74 bp, Artificial Sequence
  Description of Artificial Sequence: Synthetic oligonucleotide
gaaattaatacgactcactatagggatgaatattaaaggtcaacctaaagaagttttagagctatgctgttttg

SEQ ID NO: 2309 - DNA, 74 bp, Artificial Sequence
  Description of Artificial Sequence: Synthetic oligonucleotide
gaaattaatacgactcactatagggatgaatacaataagacctcaaaggcacgttttagagctatgctgttttg

SEQ ID NO: 2310 - DNA, 74 bp, Artificial Sequence
  Description of Artificial Sequence: Synthetic oligonucleotide
gaaattaatacgactcactatagggatgaataaaataaaaatcaactacaaagttttagagctatgctgttttg

SEQ ID NO: 2311 - DNA, 74 bp, Artificial Sequence
  Description of Artificial Sequence: Synthetic oligonucleotide
gaaattaatacgactcactatagggatgaatatagcttagtctcttgactccgttttagagctatgctgttttg

SEQ ID NO: 2312 - DNA, 74 bp, Artificial Sequence
  Description of Artificial Sequence: Synthetic oligonucleotide
gaaattaatacgactcactatagggatgaataagaacaacatgaagtgagccgttttagagctatgctgttttg

SEQ ID NO: 2313 - DNA, 74 bp, Artificial Sequence
  Description of Artificial Sequence: Synthetic oligonucleotide
gaaattaatacgactcactatagggatgaataattaaaaggggattcaagccgttttagagctatgctgttttg

SEQ ID NO: 2314 - DNA, 74 bp, Artificial Sequence
  Description of Artificial Sequence: Synthetic oligonucleotide
gaaattaatacgactcactatagggatgaatacttggtgtgtgggggggaccgttttagagctatgctgttttg

SEQ ID NO: 2315 - DNA, 74 bp, Artificial Sequence
  Description of Artificial Sequence: Synthetic oligonucleotide
gaaattaatacgactcactatagggatgaatacaggagctgttggagaggcagttttagagctatgctgttttg

SEQ ID NO: 2316 - DNA, 74 bp, Artificial Sequence
  Description of Artificial Sequence: Synthetic oligonucleotide
gaaattaatacgactcactatagggatgaatagggttgtgcttcagccctgggttttagagctatgctgttttg

SEQ ID NO: 2317 - DNA, 74 bp, Artificial Sequence
  Description of Artificial Sequence: Synthetic oligonucleotide
gaaattaatacgactcactatagggatgaataagtatggcagccttttctcagttttagagctatgctgttttg

SEQ ID NO: 2318 - DNA, 74 bp, Artificial Sequence
  Description of Artificial Sequence: Synthetic oligonucleotide
gaaattaatacgactcactatagggatgaataccgccaccacctcaggcccggttttagagctatgctgttttg

SEQ ID NO: 2319 - DNA, 74 bp, Artificial Sequence
  Description of Artificial Sequence: Synthetic oligonucleotide
gaaattaatacgactcactatagggatgaatactattctactgtggccgaacgttttagagctatgctgttttg

SEQ ID NO: 2320 - DNA, 74 bp, Artificial Sequence
  Description of Artificial Sequence: Synthetic oligonucleotide
gaaattaatacgactcactatagggatgaatatggcagttctccctggccccgttttagagctatgctgttttg

SEQ ID NO: 2321 - DNA, 74 bp, Artificial Sequence
  Description of Artificial Sequence: Synthetic oligonucleotide
gaaattaatacgactcactatagggatgaatagcaaattagatctagaataagttttagagctatgctgttttg

SEQ ID NO: 2322 - DNA, 74 bp, Artificial Sequence
  Description of Artificial Sequence: Synthetic oligonucleotide
gaaattaatacgactcactatagggatgaatatcaatcctcagaactcacgggttttagagctatgctgttttg

SEQ ID NO: 2323 - DNA, 74 bp, Artificial Sequence
  Description of Artificial Sequence: Synthetic oligonucleotide
gaaattaatacgactcactatagggatgaataaaactcttattgcatagacagttttagagctatgctgttttg

SEQ ID NO: 2324 - DNA, 74 bp, Artificial Sequence
  Description of Artificial Sequence: Synthetic oligonucleotide
gaaattaatacgactcactatagggatgaatatgtactaaaaaattctggaggttttagagctatgctgttttg

SEQ ID NO: 2325 - DNA, 74 bp, Artificial Sequence
  Description of Artificial Sequence: Synthetic oligonucleotide
gaaattaatacgactcactatagggatgaataagatattagatgttgaataagttttagagctatgctgttttg

SEQ ID NO: 2326 - DNA, 74 bp, Artificial Sequence
  Description of Artificial Sequence: Synthetic oligonucleotide
gaaattaatacgactcactatagggatgaataatttggaaagtagagacccagttttagagctatgctgttttg

SEQ ID NO: 2327 - DNA, 74 bp, Artificial Sequence
  Description of Artificial Sequence: Synthetic oligonucleotide
gaaattaatacgactcactatagggatgaataaataggcgtggagtttgcacgttttagagctatgctgttttg

SEQ ID NO: 2328 - DNA, 74 bp, Artificial Sequence
  Description of Artificial Sequence: Synthetic oligonucleotide
gaaattaatacgactcactatagggatgaatatctgcctccgaagaaaggaggttttagagctatgctgttttg

SEQ ID NO: 2329 - DNA, 74 bp, Artificial Sequence
  Description of Artificial Sequence: Synthetic oligonucleotide
gaaattaatacgactcactatagggatgaatatggggattgccagagagcgagttttagagctatgctgttttg

SEQ ID NO: 2330 - DNA, 74 bp, Artificial Sequence
  Description of Artificial Sequence: Synthetic oligonucleotide
gaaattaatacgactcactatagggatgaatataaacaggcagacaaaaaacgttttagagctatgctgttttg

SEQ ID NO: 2331 - DNA, 74 bp, Artificial Sequence
  Description of Artificial Sequence: Synthetic oligonucleotide
gaaattaatacgactcactatagggatgaataaggagggagggcaaagcaccgttttagagctatgctgttttg

SEQ ID NO: 2332 - DNA, 74 bp, Artificial Sequence
  Description of Artificial Sequence: Synthetic oligonucleotide
gaaattaatacgactcactatagggatgaatagtgggaaatacaccatagaagttttagagctatgctgttttg

SEQ ID NO: 2333 - DNA, 74 bp, Artificial Sequence
  Description of Artificial Sequence: Synthetic oligonucleotide
gaaattaatacgactcactatagggatgaatacaaatgcaaagtctctgaaggttttagagctatgctgttttg

SEQ ID NO: 2334 - DNA, 74 bp, Artificial Sequence
  Description of Artificial Sequence: Synthetic oligonucleotide
gaaattaatacgactcactatagggatgaataccactaaaacactaataacagttttagagctatgctgttttg

SEQ ID NO: 2335 - DNA, 74 bp, Artificial Sequence
  Description of Artificial Sequence: Synthetic oligonucleotide
gaaattaatacgactcactatagggatgaatatgtctactaatgattcagaagttttagagctatgctgttttg

SEQ ID NO: 2336 - DNA, 74 bp, Artificial Sequence
  Description of Artificial Sequence: Synthetic oligonucleotide
gaaattaatacgactcactatagggatgaataactctaatgatttctcagaagttttagagctatgctgttttg

SEQ ID NO: 2337 - DNA, 74 bp, Artificial Sequence
  Description of Artificial Sequence: Synthetic oligonucleotide
gaaattaatacgactcactatagggatgaatatgaaattcaaaagcttataagttttagagctatgctgttttg

SEQ ID NO: 2338 - DNA, 74 bp, Artificial Sequence
  Description of Artificial Sequence: Synthetic oligonucleotide
gaaattaatacgactcactatagggatgaatataaagagcctactctgctacgttttagagctatgctgttttg

SEQ ID NO: 2339 - DNA, 74 bp, Artificial Sequence
  Description of Artificial Sequence: Synthetic oligonucleotide
gaaattaatacgactcactatagggatgaatacatgtctcaaattgagaagggttttagagctatgctgttttg

SEQ ID NO: 2340 - DNA, 74 bp, Artificial Sequence
  Description of Artificial Sequence: Synthetic oligonucleotide
gaaattaatacgactcactatagggatgaatagaataatgctgtaatgaacagttttagagctatgctgttttg

SEQ ID NO: 2341 - DNA, 74 bp, Artificial Sequence
  Description of Artificial Sequence: Synthetic oligonucleotide
gaaattaatacgactcactatagggatgaatattaggaataaaatgggaggcgttttagagctatgctgttttg

SEQ ID NO: 2342 - DNA, 74 bp, Artificial Sequence
  Description of Artificial Sequence: Synthetic oligonucleotide
gaaattaatacgactcactatagggatgaatacaaaatccagaagaacaaaagttttagagctatgctgttttg

SEQ ID NO: 2343 - DNA, 74 bp, Artificial Sequence
  Description of Artificial Sequence: Synthetic oligonucleotide
gaaattaatacgactcactatagggatgaatatcattgatagacatttgggcgttttagagctatgctgttttg

SEQ ID NO: 2344 - DNA, 74 bp, Artificial Sequence
  Description of Artificial Sequence: Synthetic oligonucleotide
gaaattaatacgactcactatagggatgaataattaacagagttggggatgcgttttagagctatgctgttttg

SEQ ID NO: 2345 - DNA, 74 bp, Artificial Sequence
  Description of Artificial Sequence: Synthetic oligonucleotide
gaaattaatacgactcactatagggatgaatatgagtacacttttataggaggttttagagctatgctgttttg

SEQ ID NO: 2346 - DNA, 74 bp, Artificial Sequence
  Description of Artificial Sequence: Synthetic oligonucleotide
gaaattaatacgactcactatagggatgaataatgtgaatactgtattgaaggttttagagctatgctgttttg

SEQ ID NO: 2347 - DNA, 74 bp, Artificial Sequence
  Description of Artificial Sequence: Synthetic oligonucleotide
gaaattaatacgactcactatagggatgaatacttcttggagagaaatagaagttttagagctatgctgttttg

SEQ ID NO: 2348 - DNA, 74 bp, Artificial Sequence
  Description of Artificial Sequence: Synthetic oligonucleotide
gaaattaatacgactcactatagggatgaatacaagagaaggtgccccaaaagttttagagctatgctgttttg

SEQ ID NO: 2349 - DNA, 74 bp, Artificial Sequence
  Description of Artificial Sequence: Synthetic oligonucleotide
gaaattaatacgactcactatagggatgaatacatcagttgtggttggacaagttttagagctatgctgttttg

SEQ ID NO: 2350 - DNA, 74 bp, Artificial Sequence
  Description of Artificial Sequence: Synthetic oligonucleotide
gaaattaatacgactcactatagggatgaatagatgagaaaactaagactcagttttagagctatgctgttttg

SEQ ID NO: 2351 - DNA, 74 bp, Artificial Sequence
  Description of Artificial Sequence: Synthetic oligonucleotide
gaaattaatacgactcactatagggatgaataacttttacacccatgccccagttttagagctatgctgttttg

SEQ ID NO: 2352 - DNA, 74 bp, Artificial Sequence
  Description of Artificial Sequence: Synthetic oligonucleotide
gaaattaatacgactcactatagggatgaatattttggccttggatttggcagttttagagctatgctgttttg

SEQ ID NO: 2353 - DNA, 74 bp, Artificial Sequence
  Description of Artificial Sequence: Synthetic oligonucleotide
gaaattaatacgactcactatagggatgaatagttgatgagattcccaaggagttttagagctatgctgttttg

SEQ ID NO: 2354 - DNA, 74 bp, Artificial Sequence
  Description of Artificial Sequence: Synthetic oligonucleotide
gaaattaatacgactcactatagggatgaatagggagagggaggagcaatgcgttttagagctatgctgttttg

SEQ ID NO: 2355 - DNA, 74 bp, Artificial Sequence
  Description of Artificial Sequence: Synthetic oligonucleotide
gaaattaatacgactcactatagggatgaatatctgtccctttagataacccgttttagagctatgctgttttg

SEQ ID NO: 2356 - DNA, 74 bp, Artificial Sequence
  Description of Artificial Sequence: Synthetic oligonucleotide
gaaattaatacgactcactatagggatgaataagtgaacattggcggtagccgttttagagctatgctgttttg

SEQ ID NO: 2357 - DNA, 74 bp, Artificial Sequence
  Description of Artificial Sequence: Synthetic oligonucleotide
gaaattaatacgactcactatagggatgaatagttggacatggggtgggggcgttttagagctatgctgttttg

SEQ ID NO: 2358 - DNA, 74 bp, Artificial Sequence
  Description of Artificial Sequence: Synthetic oligonucleotide
gaaattaatacgactcactatagggatgaataaattaaaggagtagagccaggttttagagctatgctgttttg

SEQ ID NO: 2359 - DNA, 74 bp, Artificial Sequence
  Description of Artificial Sequence: Synthetic oligonucleotide
gaaattaatacgactcactatagggatgaatagttgtacccccatccaataagttttagagctatgctgttttg

SEQ ID NO: 2360 - DNA, 74 bp, Artificial Sequence
  Description of Artificial Sequence: Synthetic oligonucleotide
gaaattaatacgactcactatagggatgaataattgtagaagactgggccacgttttagagctatgctgttttg

SEQ ID NO: 2361 - DNA, 74 bp, Artificial Sequence
  Description of Artificial Sequence: Synthetic oligonucleotide
gaaattaatacgactcactatagggatgaatagaaatgcaagcacaaaaggcgttttagagctatgctgttttg

SEQ ID NO: 2362 - DNA, 74 bp, Artificial Sequence
  Description of Artificial Sequence: Synthetic oligonucleotide
gaaattaatacgactcactatagggatgaatacttaaacccagaatccccgagttttagagctatgctgttttg

SEQ ID NO: 2363 - DNA, 74 bp, Artificial Sequence
  Description of Artificial Sequence: Synthetic oligonucleotide
gaaattaatacgactcactatagggatgaatatatctcttccagaagccaaagttttagagctatgctgttttg

SEQ ID NO: 2364 - DNA, 74 bp, Artificial Sequence
  Description of Artificial Sequence: Synthetic oligonucleotide
gaaattaatacgactcactatagggatgaatatatgcttagccacctgctccgttttagagctatgctgttttg

SEQ ID NO: 2365 - DNA, 74 bp, Artificial Sequence
  Description of Artificial Sequence: Synthetic oligonucleotide
gaaattaatacgactcactatagggatgaatatataaaccttcataacctgggttttagagctatgctgttttg

SEQ ID NO: 2366 - DNA, 74 bp, Artificial Sequence
  Description of Artificial Sequence: Synthetic oligonucleotide
gaaattaatacgactcactatagggatgaatattggtgtatttctggtgggggttttagagctatgctgttttg

SEQ ID NO: 2367 - DNA, 74 bp, Artificial Sequence
  Description of Artificial Sequence: Synthetic oligonucleotide
gaaattaatacgactcactatagggatgaatatagccaacagctttctcagggttttagagctatgctgttttg

SEQ ID NO: 2368 - DNA, 74 bp, Artificial Sequence
  Description of Artificial Sequence: Synthetic oligonucleotide
gaaattaatacgactcactatagggatgaataatgcgtagtaaggggcaaaagttttagagctatgctgttttg

SEQ ID NO: 2369 - DNA, 74 bp, Artificial Sequence
  Description of Artificial Sequence: Synthetic oligonucleotide
gaaattaatacgactcactatagggatgaatacttgctctggggacatgtccgttttagagctatgctgttttg

SEQ ID NO: 2370 - DNA, 74 bp, Artificial Sequence
  Description of Artificial Sequence: Synthetic oligonucleotide
gaaattaatacgactcactatagggatgaataggaaaatttcctaacaaaacgttttagagctatgctgttttg

SEQ ID NO: 2371 - DNA, 74 bp, Artificial Sequence
  Description of Artificial Sequence: Synthetic oligonucleotide
gaaattaatacgactcactatagggatgaatacggcataagcagatatgagcgttttagagctatgctgttttg

SEQ ID NO: 2372 - DNA, 74 bp, Artificial Sequence
  Description of Artificial Sequence: Synthetic oligonucleotide
gaaattaatacgactcactatagggatgaataaagactggattcctggggaggttttagagctatgctgttttg

SEQ ID NO: 2373 - DNA, 74 bp, Artificial Sequence
  Description of Artificial Sequence: Synthetic oligonucleotide
gaaattaatacgactcactatagggatgaataggtcccactcccatggaaccgttttagagctatgctgttttg

SEQ ID NO: 2374 - DNA, 74 bp, Artificial Sequence
  Description of Artificial Sequence: Synthetic oligonucleotide
gaaattaatacgactcactatagggatgaatattgcatactccagtggctccgttttagagctatgctgttttg

SEQ ID NO: 2375 - DNA, 74 bp, Artificial Sequence
  Description of Artificial Sequence: Synthetic oligonucleotide
gaaattaatacgactcactatagggatgaataaaaaaaaaaaaaaaaaaaaagttttagagctatgctgttttg

SEQ ID NO: 2376 - DNA, 74 bp, Artificial Sequence
  Description of Artificial Sequence: Synthetic oligonucleotide
gaaattaatacgactcactatagggatgaataggtttcatggcctatgaaaagttttagagctatgctgttttg

SEQ ID NO: 2377 - DNA, 74 bp, Artificial Sequence
  Description of Artificial Sequence: Synthetic oligonucleotide
gaaattaatacgactcactatagggatgaatacttgaagttgaaaaggctgcgttttagagctatgctgttttg

SEQ ID NO: 2378 - DNA, 74 bp, Artificial Sequence
  Description of Artificial Sequence: Synthetic oligonucleotide
gaaattaatacgactcactatagggatgaataatgagctaatctatagaaaggttttagagctatgctgttttg

SEQ ID NO: 2379 - DNA, 74 bp, Artificial Sequence
  Description of Artificial Sequence: Synthetic oligonucleotide
gaaattaatacgactcactatagggatgaatattttcagcagcattttaagggttttagagctatgctgttttg

SEQ ID NO: 2380 - DNA, 74 bp, Artificial Sequence
  Description of Artificial Sequence: Synthetic oligonucleotide
gaaattaatacgactcactatagggatgaatagtatgcatttattgatgtaggttttagagctatgctgttttg

SEQ ID NO: 2381 - DNA, 74 bp, Artificial Sequence
  Description of Artificial Sequence: Synthetic oligonucleotide
gaaattaatacgactcactatagggatgaatagtggcagtagagagaaataagttttagagctatgctgttttg

SEQ ID NO: 2382 - DNA, 74 bp, Artificial Sequence
  Description of Artificial Sequence: Synthetic oligonucleotide
gaaattaatacgactcactatagggatgaataacaacccatttagaggctcagttttagagctatgctgttttg

SEQ ID NO: 2383 - DNA, 74 bp, Artificial Sequence
  Description of Artificial Sequence: Synthetic oligonucleotide
gaaattaatacgactcactatagggatgaataaatgagaacaggttcagggggttttagagctatgctgttttg

SEQ ID NO: 2384 - DNA, 74 bp, Artificial Sequence
  Description of Artificial Sequence: Synthetic oligonucleotide
gaaattaatacgactcactatagggatgaatacagtcaccaactggtaccaggttttagagctatgctgttttg

SEQ ID NO: 2385 - DNA, 74 bp, Artificial Sequence
  Description of Artificial Sequence: Synthetic oligonucleotide
gaaattaatacgactcactatagggatgaatatctagtaggtcagtgtggaggttttagagctatgctgttttg

SEQ ID NO: 2386 - DNA, 74 bp, Artificial Sequence
  Description of Artificial Sequence: Synthetic oligonucleotide
gaaattaatacgactcactatagggatgaatatgggcctgacggtgcacagagttttagagctatgctgttttg

SEQ ID NO: 2387 - DNA, 74 bp, Artificial Sequence
  Description of Artificial Sequence: Synthetic oligonucleotide
gaaattaatacgactcactatagggatgaataagtaaggaatagttagccccgttttagagctatgctgttttg

SEQ ID NO: 2388 - DNA, 74 bp, Artificial Sequence
  Description of Artificial Sequence: Synthetic oligonucleotide
gaaattaatacgactcactatagggatgaatagttccataagaggaatctcagttttagagctatgctgttttg

SEQ ID NO: 2389 - DNA, 74 bp, Artificial Sequence
  Description of Artificial Sequence: Synthetic oligonucleotide
gaaattaatacgactcactatagggatgaataaggagatctcacttccctgagttttagagctatgctgttttg

SEQ ID NO: 2390 - DNA, 74 bp, Artificial Sequence
  Description of Artificial Sequence: Synthetic oligonucleotide
gaaattaatacgactcactatagggatgaatagcgtgttgctccaaaccgccgttttagagctatgctgttttg

SEQ ID NO: 2391 - DNA, 74 bp, Artificial Sequence
  Description of Artificial Sequence: Synthetic oligonucleotide
gaaattaatacgactcactatagggatgaatacttgcaaccgtgggctataggttttagagctatgctgttttg

SEQ ID NO: 2392 - DNA, 74 bp, Artificial Sequence
  Description of Artificial Sequence: Synthetic oligonucleotide
gaaattaatacgactcactatagggatgaataccaccaattgtcctctccacgttttagagctatgctgttttg

SEQ ID NO: 2393 - DNA, 74 bp, Artificial Sequence
  Description of Artificial Sequence: Synthetic oligonucleotide
gaaattaatacgactcactatagggatgaatagaatgacttttgcaaccaaagttttagagctatgctgttttg

SEQ ID NO: 2394 - DNA, 74 bp, Artificial Sequence
  Description of Artificial Sequence: Synthetic oligonucleotide
gaaattaatacgactcactatagggatgaataataaatacctaagaatagaagttttagagctatgctgttttg

SEQ ID NO: 2395 - DNA, 74 bp, Artificial Sequence
  Description of Artificial Sequence: Synthetic oligonucleotide
gaaattaatacgactcactatagggatgaatatttgttaattttttctgtaagttttagagctatgctgttttg

SEQ ID NO: 2396 - DNA, 74 bp, Artificial Sequence
  Description of Artificial Sequence: Synthetic oligonucleotide
gaaattaatacgactcactatagggatgaatatgtaacatgacgaatactgcgttttagagctatgctgttttg

SEQ ID NO: 2397 - DNA, 74 bp, Artificial Sequence
  Description of Artificial Sequence: Synthetic oligonucleotide
gaaattaatacgactcactatagggatgaatagtaatgcaagggaactatgggttttagagctatgctgttttg

SEQ ID NO: 2398 - DNA, 74 bp, Artificial Sequence
  Description of Artificial Sequence: Synthetic oligonucleotide
gaaattaatacgactcactatagggatgaataccttggctctgcactaatccgttttagagctatgctgttttg

SEQ ID NO: 2399 - DNA, 74 bp, Artificial Sequence
  Description of Artificial Sequence: Synthetic oligonucleotide
gaaattaatacgactcactatagggatgaatacaagggaatctcctgtgcccgttttagagctatgctgttttg

SEQ ID NO: 2400 - DNA, 74 bp, Artificial Sequence
  Description of Artificial Sequence: Synthetic oligonucleotide
gaaattaatacgactcactatagggatgaataagggccctctgggctccaaggttttagagctatgctgttttg

SEQ ID NO: 2401 - DNA, 74 bp, Artificial Sequence
  Description of Artificial Sequence: Synthetic oligonucleotide
gaaattaatacgactcactatagggatgaatatgtgggcacgtgagagatccgttttagagctatgctgttttg

SEQ ID NO: 2402 - DNA, 74 bp, Artificial Sequence
  Description of Artificial Sequence: Synthetic oligonucleotide
gaaattaatacgactcactatagggatgaatattgcccgttgaggagtagcagttttagagctatgctgttttg

SEQ ID NO: 2403 - DNA, 74 bp, Artificial Sequence
  Description of Artificial Sequence: Synthetic oligonucleotide
gaaattaatacgactcactatagggatgaatattgttctttctccagcccaagttttagagctatgctgttttg

SEQ ID NO: 2404 - DNA, 74 bp, Artificial Sequence
  Description of Artificial Sequence: Synthetic oligonucleotide
gaaattaatacgactcactatagggatgaatacaatgagattgttcagccaggttttagagctatgctgttttg

SEQ ID NO: 2405 - DNA, 74 bp, Artificial Sequence
  Description of Artificial Sequence: Synthetic oligonucleotide
gaaattaatacgactcactatagggatgaataaggtactgctacattggcaagttttagagctatgctgttttg

SEQ ID NO: 2406 - DNA, 74 bp, Artificial Sequence
  Description of Artificial Sequence: Synthetic oligonucleotide
gaaattaatacgactcactatagggatgaatatggcagcttgggcacactgggttttagagctatgctgttttg

SEQ ID NO: 2407 - DNA, 74 bp, Artificial Sequence
  Description of Artificial Sequence: Synthetic oligonucleotide
gaaattaatacgactcactatagggatgaatagcattgtgggcccaaggtgggttttagagctatgctgttttg

SEQ ID NO: 2408 - DNA, 74 bp, Artificial Sequence
  Description of Artificial Sequence: Synthetic oligonucleotide
gaaattaatacgactcactatagggatgaatagcagggcagctgtggcatgcgttttagagctatgctgttttg

SEQ ID NO: 2409 - DNA, 74 bp, Artificial Sequence
  Description of Artificial Sequence: Synthetic oligonucleotide
gaaattaatacgactcactatagggatgaatactgtgtttcaggcccaagccgttttagagctatgctgttttg

SEQ ID NO: 2410 - DNA, 74 bp, Artificial Sequence
  Description of Artificial Sequence: Synthetic oligonucleotide
gaaattaatacgactcactatagggatgaatacttggcaatggcaatggcaggttttagagctatgctgttttg

SEQ ID NO: 2411 - DNA, 74 bp, Artificial Sequence
  Description of Artificial Sequence: Synthetic oligonucleotide
gaaattaatacgactcactatagggatgaataaaagatgacctcagcagagggttttagagctatgctgttttg

SEQ ID NO: 2412 - DNA, 74 bp, Artificial Sequence
  Description of Artificial Sequence: Synthetic oligonucleotide
gaaattaatacgactcactatagggatgaatagagggctattctgatggaaagttttagagctatgctgttttg

SEQ ID NO: 2413 - DNA, 74 bp, Artificial Sequence
  Description of Artificial Sequence: Synthetic oligonucleotide
gaaattaatacgactcactatagggatgaataccaacttacagtgggtccaggttttagagctatgctgttttg

SEQ ID NO: 2414 - DNA, 74 bp, Artificial Sequence
  Description of Artificial Sequence: Synthetic oligonucleotide
gaaattaatacgactcactatagggatgaataattataaaaatagagaatcagttttagagctatgctgttttg

SEQ ID NO: 2415 - DNA, 74 bp, Artificial Sequence
  Description of Artificial Sequence: Synthetic oligonucleotide
gaaattaatacgactcactatagggatgaataaggcattggctaattaatcagttttagagctatgctgttttg

SEQ ID NO: 2416 - DNA, 74 bp, Artificial Sequence
  Description of Artificial Sequence: Synthetic oligonucleotide
gaaattaatacgactcactatagggatgaatactgtgtgccagatcttacaggttttagagctatgctgttttg

SEQ ID NO: 2417 - DNA, 74 bp, Artificial Sequence
  Description of Artificial Sequence: Synthetic oligonucleotide
gaaattaatacgactcactatagggatgaatatctcccctctggctgagagcgttttagagctatgctgttttg

SEQ ID NO: 2418 - DNA, 74 bp, Artificial Sequence
  Description of Artificial Sequence: Synthetic oligonucleotide
gaaattaatacgactcactatagggatgaatacttttccctctgctttccaagttttagagctatgctgttttg

SEQ ID NO: 2419 - DNA, 74 bp, Artificial Sequence
  Description of Artificial Sequence: Synthetic oligonucleotide
gaaattaatacgactcactatagggatgaatacaggtccaaaagttctgtccgttttagagctatgctgttttg

SEQ ID NO: 2420 - DNA, 74 bp, Artificial Sequence
  Description of Artificial Sequence: Synthetic oligonucleotide
gaaattaatacgactcactatagggatgaatacagctggggaggactacagagttttagagctatgctgttttg

SEQ ID NO: 2421 - DNA, 74 bp, Artificial Sequence
  Description of Artificial Sequence: Synthetic oligonucleotide
gaaattaatacgactcactatagggatgaatagcactttggcatacaggcaggttttagagctatgctgttttg

SEQ ID NO: 2422 - DNA, 74 bp, Artificial Sequence
  Description of Artificial Sequence: Synthetic oligonucleotide
gaaattaatacgactcactatagggatgaatagaaggtatccaagttaccgggttttagagctatgctgttttg

SEQ ID NO: 2423 - DNA, 74 bp, Artificial Sequence
  Description of Artificial Sequence: Synthetic oligonucleotide
gaaattaatacgactcactatagggatgaatatgtttgagatacagtgagacgttttagagctatgctgttttg

SEQ ID NO: 2424 - DNA, 74 bp, Artificial Sequence
  Description of Artificial Sequence: Synthetic oligonucleotide
gaaattaatacgactcactatagggatgaatatatgctcactacttgtgtaagttttagagctatgctgttttg

SEQ ID NO: 2425 - DNA, 74 bp, Artificial Sequence
  Description of Artificial Sequence: Synthetic oligonucleotide
gaaattaatacgactcactatagggatgaataagtaggtttggacataaacagttttagagctatgctgttttg

SEQ ID NO: 2426 - DNA, 74 bp, Artificial Sequence
  Description of Artificial Sequence: Synthetic oligonucleotide
gaaattaatacgactcactatagggatgaatactagcttgaaataaccatgcgttttagagctatgctgttttg

SEQ ID NO: 2427 - DNA, 74 bp, Artificial Sequence
  Description of Artificial Sequence: Synthetic oligonucleotide
gaaattaatacgactcactatagggatgaatacaaacaaacaatggctatacgttttagagctatgctgttttg

SEQ ID NO: 2428 - DNA, 74 bp, Artificial Sequence
  Description of Artificial Sequence: Synthetic oligonucleotide
gaaattaatacgactcactatagggatgaataggtggacctcatggcccacggttttagagctatgctgttttg

SEQ ID NO: 2429 - DNA, 74 bp, Artificial Sequence
  Description of Artificial Sequence: Synthetic oligonucleotide
gaaattaatacgactcactatagggatgaatacaagggagctccctgggaaagttttagagctatgctgttttg

SEQ ID NO: 2430 - DNA, 74 bp, Artificial Sequence
  Description of Artificial Sequence: Synthetic oligonucleotide
gaaattaatacgactcactatagggatgaataagaacctggatatggactgcgttttagagctatgctgttttg

SEQ ID NO: 2431 - DNA, 74 bp, Artificial Sequence
  Description of Artificial Sequence: Synthetic oligonucleotide
gaaattaatacgactcactatagggatgaataagtggcctggtcttctataggttttagagctatgctgttttg

SEQ ID NO: 2432 - DNA, 74 bp, Artificial Sequence
  Description of Artificial Sequence: Synthetic oligonucleotide
gaaattaatacgactcactatagggatgaataggaaaacagagtgagagtacgttttagagctatgctgttttg

SEQ ID NO: 2433 - DNA, 74 bp, Artificial Sequence
  Description of Artificial Sequence: Synthetic oligonucleotide
gaaattaatacgactcactatagggatgaatatctgtgatttgaggtggtaagttttagagctatgctgttttg

SEQ ID NO: 2434 - DNA, 74 bp, Artificial Sequence
  Description of Artificial Sequence: Synthetic oligonucleotide
gaaattaatacgactcactatagggatgaatatatgagctctctcatcgtgagttttagagctatgctgttttg

SEQ ID NO: 2435 - DNA, 74 bp, Artificial Sequence
  Description of Artificial Sequence: Synthetic oligonucleotide
gaaattaatacgactcactatagggatgaataactgtccatggtggcagcaagttttagagctatgctgttttg

SEQ ID NO: 2436 - DNA, 74 bp, Artificial Sequence
  Description of Artificial Sequence: Synthetic oligonucleotide
gaaattaatacgactcactatagggatgaatataggtttggtgcagcagaaagttttagagctatgctgttttg

SEQ ID NO: 2437 - DNA, 74 bp, Artificial Sequence
  Description of Artificial Sequence: Synthetic oligonucleotide
gaaattaatacgactcactatagggatgaatagaataaatagagtctggtgagttttagagctatgctgttttg

SEQ ID NO: 2438 - DNA, 74 bp, Artificial Sequence
  Description of Artificial Sequence: Synthetic oligonucleotide
gaaattaatacgactcactatagggatgaatatatttgataaaaattaaaaagttttagagctatgctgttttg

SEQ ID NO: 2439 - DNA, 74 bp, Artificial Sequence
  Description of Artificial Sequence: Synthetic oligonucleotide
gaaattaatacgactcactatagggatgaatattgaagtatgagaagtatgggttttagagctatgctgttttg

SEQ ID NO: 2440 - DNA, 74 bp, Artificial Sequence
  Description of Artificial Sequence: Synthetic oligonucleotide
gaaattaatacgactcactatagggatgaataatatgtgacacataaaataggttttagagctatgctgttttg

SEQ ID NO: 2441 - DNA, 74 bp, Artificial Sequence
  Description of Artificial Sequence: Synthetic oligonucleotide
gaaattaatacgactcactatagggatgaatattgttttagccctagagggggttttagagctatgctgttttg

SEQ ID NO: 2442 - DNA, 74 bp, Artificial Sequence
  Description of Artificial Sequence: Synthetic oligonucleotide
gaaattaatacgactcactatagggatgaataagtttcttattgttgtctcagttttagagctatgctgttttg

SEQ ID NO: 2443 - DNA, 74 bp, Artificial Sequence
  Description of Artificial Sequence: Synthetic oligonucleotide
gaaattaatacgactcactatagggatgaatattatgaaaaaatattactcagttttagagctatgctgttttg

SEQ ID NO: 2444 - DNA, 74 bp, Artificial Sequence
  Description of Artificial Sequence: Synthetic oligonucleotide
gaaattaatacgactcactatagggatgaatataatagactcccagggagaagttttagagctatgctgttttg

SEQ ID NO: 2445 - DNA, 74 bp, Artificial Sequence
  Description of Artificial Sequence: Synthetic oligonucleotide
gaaattaatacgactcactatagggatgaatagatgtgcttatagaatataagttttagagctatgctgttttg

SEQ ID NO: 2446 - DNA, 74 bp, Artificial Sequence
  Description of Artificial Sequence: Synthetic oligonucleotide
gaaattaatacgactcactatagggatgaataatttacagctgaagccccgggttttagagctatgctgttttg

SEQ ID NO: 2447 - DNA, 74 bp, Artificial Sequence
  Description of Artificial Sequence: Synthetic oligonucleotide
gaaattaatacgactcactatagggatgaatatctcgcagggcatgcgatgggttttagagctatgctgttttg

SEQ ID NO: 2448 - DNA, 74 bp, Artificial Sequence
  Description of Artificial Sequence: Synthetic oligonucleotide
gaaattaatacgactcactatagggatgaataagagttaagctttctccacagttttagagctatgctgttttg

SEQ ID NO: 2449 - DNA, 74 bp, Artificial Sequence
  Description of Artificial Sequence: Synthetic oligonucleotide
gaaattaatacgactcactatagggatgaataaggggaagagtactacatcagttttagagctatgctgttttg

SEQ ID NO: 2450 - DNA, 74 bp, Artificial Sequence
  Description of Artificial Sequence: Synthetic oligonucleotide
gaaattaatacgactcactatagggatgaataagaatccacagaccctctgagttttagagctatgctgttttg

SEQ ID NO: 2451 - DNA, 74 bp, Artificial Sequence
  Description of Artificial Sequence: Synthetic oligonucleotide
gaaattaatacgactcactatagggatgaatagaagatggtggataggaggcgttttagagctatgctgttttg

SEQ ID NO: 2452 - DNA, 74 bp, Artificial Sequence
  Description of Artificial Sequence: Synthetic oligonucleotide
gaaattaatacgactcactatagggatgaataagaataactaccttgtggccgttttagagctatgctgttttg

SEQ ID NO: 2453 - DNA, 74 bp, Artificial Sequence
  Description of Artificial Sequence: Synthetic oligonucleotide
gaaattaatacgactcactatagggatgaatattttaacctccactctctaagttttagagctatgctgttttg

SEQ ID NO: 2454 - DNA, 74 bp, Artificial Sequence
  Description of Artificial Sequence: Synthetic oligonucleotide
gaaattaatacgactcactatagggatgaatattaagaaacaggccatctcagttttagagctatgctgttttg

SEQ ID NO: 2455 - DNA, 74 bp, Artificial Sequence
  Description of Artificial Sequence: Synthetic oligonucleotide
gaaattaatacgactcactatagggatgaatattatacaggccggccccagagttttagagctatgctgttttg

SEQ ID NO: 2456 - DNA, 74 bp, Artificial Sequence
  Description of Artificial Sequence: Synthetic oligonucleotide
gaaattaatacgactcactatagggatgaataaagcaacgtttctgacataagttttagagctatgctgttttg

SEQ ID NO: 2457 - DNA, 74 bp, Artificial Sequence
  Description of Artificial Sequence: Synthetic oligonucleotide
gaaattaatacgactcactatagggatgaatagatcaagaaaggactcatcggttttagagctatgctgttttg

SEQ ID NO: 2458 - DNA, 74 bp, Artificial Sequence
  Description of Artificial Sequence: Synthetic oligonucleotide
gaaattaatacgactcactatagggatgaatattatacactgttccacatgcgttttagagctatgctgttttg

SEQ ID NO: 2459 - DNA, 74 bp, Artificial Sequence
  Description of Artificial Sequence: Synthetic oligonucleotide
gaaattaatacgactcactatagggatgaataagaatggaggccgggtgcaggttttagagctatgctgttttg

SEQ ID NO: 2460 - DNA, 74 bp, Artificial Sequence
  Description of Artificial Sequence: Synthetic oligonucleotide
gaaattaatacgactcactatagggatgaataccacaaaagttgtataacccgttttagagctatgctgttttg

SEQ ID NO: 2461 - DNA, 74 bp, Artificial Sequence
  Description of Artificial Sequence: Synthetic oligonucleotide
gaaattaatacgactcactatagggatgaatatgaggcccccttcccagccagttttagagctatgctgttttg

SEQ ID NO: 2462 - DNA, 74 bp, Artificial Sequence
  Description of Artificial Sequence: Synthetic oligonucleotide
gaaattaatacgactcactatagggatgaatagagatctgatggttttataagttttagagctatgctgttttg

SEQ ID NO: 2463 - DNA, 74 bp, Artificial Sequence
  Description of Artificial Sequence: Synthetic oligonucleotide
gaaattaatacgactcactatagggatgaatactgagatgcctcttggatacgttttagagctatgctgttttg

SEQ ID NO: 2464 - DNA, 74 bp, Artificial Sequence
  Description of Artificial Sequence: Synthetic oligonucleotide
gaaattaatacgactcactatagggatgaataagtgatacctgatgtcatacgttttagagctatgctgttttg

SEQ ID NO: 2465 - DNA, 74 bp, Artificial Sequence
  Description of Artificial Sequence: Synthetic oligonucleotide
gaaattaatacgactcactatagggatgaataataatttatcacttgtctcagttttagagctatgctgttttg

SEQ ID NO: 2466 - DNA, 74 bp, Artificial Sequence
  Description of Artificial Sequence: Synthetic oligonucleotide
gaaattaatacgactcactatagggatgaataatgggattggagggaaaaaagttttagagctatgctgttttg

SEQ ID NO: 2467 - DNA, 74 bp, Artificial Sequence
  Description of Artificial Sequence: Synthetic oligonucleotide
gaaattaatacgactcactatagggatgaatacaggtgtgattcaccacgccgttttagagctatgctgttttg

SEQ ID NO: 2468 - DNA, 74 bp, Artificial Sequence
  Description of Artificial Sequence: Synthetic oligonucleotide
gaaattaatacgactcactatagggatgaatagtagggaggaatgaataaaagttttagagctatgctgttttg

SEQ ID NO: 2469 - DNA, 74 bp, Artificial Sequence
  Description of Artificial Sequence: Synthetic oligonucleotide
gaaattaatacgactcactatagggatgaataaaagatgaataagaaggtaggttttagagctatgctgttttg

SEQ ID NO: 2470 - DNA, 74 bp, Artificial Sequence
  Description of Artificial Sequence: Synthetic oligonucleotide
gaaattaatacgactcactatagggatgaataaagaactcacattgtactgggttttagagctatgctgttttg

SEQ ID NO: 2471 - DNA, 74 bp, Artificial Sequence
  Description of Artificial Sequence: Synthetic oligonucleotide
gaaattaatacgactcactatagggatgaatattgcttcaggtgagagaagagttttagagctatgctgttttg

SEQ ID NO: 2472 - DNA, 74 bp, Artificial Sequence
  Description of Artificial Sequence: Synthetic oligonucleotide
gaaattaatacgactcactatagggatgaataattattgtcatgacaaatgggttttagagctatgctgttttg

SEQ ID NO: 2473 - DNA, 74 bp, Artificial Sequence
  Description of Artificial Sequence: Synthetic oligonucleotide
gaaattaatacgactcactatagggatgaataagaggaagctagtcagaaaagttttagagctatgctgttttg

SEQ ID NO: 2474 - DNA, 74 bp, Artificial Sequence
  Description of Artificial Sequence: Synthetic oligonucleotide
gaaattaatacgactcactatagggatgaatatagagctttcagagggagcagttttagagctatgctgttttg

SEQ ID NO: 2475 - DNA, 74 bp, Artificial Sequence
  Description of Artificial Sequence: Synthetic oligonucleotide
gaaattaatacgactcactatagggatgaatagatggaggcagagattggaggttttagagctatgctgttttg

SEQ ID NO: 2476 - DNA, 74 bp, Artificial Sequence
  Description of Artificial Sequence: Synthetic oligonucleotide
gaaattaatacgactcactatagggatgaataaagtggaagaaaccttctgggttttagagctatgctgttttg

SEQ ID NO: 2477 - DNA, 74 bp, Artificial Sequence
  Description of Artificial Sequence: Synthetic oligonucleotide
gaaattaatacgactcactatagggatgaatataagattaatgtcagagtaagttttagagctatgctgttttg

SEQ ID NO: 2478 - DNA, 74 bp, Artificial Sequence
  Description of Artificial Sequence: Synthetic oligonucleotide
gaaattaatacgactcactatagggatgaatatctttcttgtgtattcctgcgttttagagctatgctgttttg

SEQ ID NO: 2479 - DNA, 74 bp, Artificial Sequence
  Description of Artificial Sequence: Synthetic oligonucleotide
gaaattaatacgactcactatagggatgaatataacataattttttaagagggttttagagctatgctgttttg

SEQ ID NO: 2480 - DNA, 74 bp, Artificial Sequence
  Description of Artificial Sequence: Synthetic oligonucleotide
gaaattaatacgactcactatagggatgaatattaaccacatggataacaacgttttagagctatgctgttttg

SEQ ID NO: 2481 - DNA, 74 bp, Artificial Sequence
  Description of Artificial Sequence: Synthetic oligonucleotide
gaaattaatacgactcactatagggatgaataagggtagctgacttaagggggttttagagctatgctgttttg

SEQ ID NO: 2482 - DNA, 74 bp, Artificial Sequence
  Description of Artificial Sequence: Synthetic oligonucleotide
gaaattaatacgactcactatagggatgaatagaatgtaattaattatagcagttttagagctatgctgttttg

SEQ ID NO: 2483 - DNA, 74 bp, Artificial Sequence
  Description of Artificial Sequence: Synthetic oligonucleotide
gaaattaatacgactcactatagggatgaataggtgaaaaagaagctaacacgttttagagctatgctgttttg

SEQ ID NO: 2484 - DNA, 74 bp, Artificial Sequence
  Description of Artificial Sequence: Synthetic oligonucleotide
gaaattaatacgactcactatagggatgaataacagtgcaacactagtatcagttttagagctatgctgttttg

SEQ ID NO: 2485 - DNA, 74 bp, Artificial Sequence
  Description of Artificial Sequence: Synthetic oligonucleotide
gaaattaatacgactcactatagggatgaataaaactttctgaacctaatgagttttagagctatgctgttttg

SEQ ID NO: 2486 - DNA, 74 bp, Artificial Sequence
  Description of Artificial Sequence: Synthetic oligonucleotide
gaaattaatacgactcactatagggatgaataaaattcctcgctgggcacaggttttagagctatgctgttttg

SEQ ID NO: 2487 - DNA, 74 bp, Artificial Sequence
  Description of Artificial Sequence: Synthetic oligonucleotide
gaaattaatacgactcactatagggatgaataagagttagaccacacagcccgttttagagctatgctgttttg

SEQ ID NO: 2488 - DNA, 74 bp, Artificial Sequence
  Description of Artificial Sequence: Synthetic oligonucleotide
gaaattaatacgactcactatagggatgaatatttagcctccaatactcaaagttttagagctatgctgttttg

SEQ ID NO: 2489 - DNA, 74 bp, Artificial Sequence
  Description of Artificial Sequence: Synthetic oligonucleotide
gaaattaatacgactcactatagggatgaataacagcagaacaatcttgcccgttttagagctatgctgttttg

SEQ ID NO: 2490 - DNA, 74 bp, Artificial Sequence
  Description of Artificial Sequence: Synthetic oligonucleotide
gaaattaatacgactcactatagggatgaataccagggacgcccattccccagttttagagctatgctgttttg

SEQ ID NO: 2491 - DNA, 74 bp, Artificial Sequence
  Description of Artificial Sequence: Synthetic oligonucleotide
gaaattaatacgactcactatagggatgaataaggagaccccatgatccccagttttagagctatgctgttttg

SEQ ID NO: 2492 - DNA, 74 bp, Artificial Sequence
  Description of Artificial Sequence: Synthetic oligonucleotide
gaaattaatacgactcactatagggatgaatagaacccagactcctaggaaagttttagagctatgctgttttg

SEQ ID NO: 2493 - DNA, 74 bp, Artificial Sequence
  Description of Artificial Sequence: Synthetic oligonucleotide
gaaattaatacgactcactatagggatgaatagtagtttcatggccaaagaagttttagagctatgctgttttg

SEQ ID NO: 2494 - DNA, 74 bp, Artificial Sequence
  Description of Artificial Sequence: Synthetic oligonucleotide
gaaattaatacgactcactatagggatgaatataaatgcagctgagaggtgagttttagagctatgctgttttg

SEQ ID NO: 2495 - DNA, 74 bp, Artificial Sequence
  Description of Artificial Sequence: Synthetic oligonucleotide
gaaattaatacgactcactatagggatgaatacctgagcagtctagccaacagttttagagctatgctgttttg

SEQ ID NO: 2496 - DNA, 74 bp, Artificial Sequence
  Description of Artificial Sequence: Synthetic oligonucleotide
gaaattaatacgactcactatagggatgaataacttattgccttccagcaacgttttagagctatgctgttttg

SEQ ID NO: 2497 - DNA, 74 bp, Artificial Sequence
  Description of Artificial Sequence: Synthetic oligonucleotide
gaaattaatacgactcactatagggatgaataagaaatgactgaagaggtcagttttagagctatgctgttttg

SEQ ID NO: 2498 - DNA, 74 bp, Artificial Sequence
  Description of Artificial Sequence: Synthetic oligonucleotide
gaaattaatacgactcactatagggatgaatattaactttctttgagagaaagttttagagctatgctgttttg

SEQ ID NO: 2499 - DNA, 74 bp, Artificial Sequence
  Description of Artificial Sequence: Synthetic oligonucleotide
gaaattaatacgactcactatagggatgaatagaaaggaggtcagagaagaagttttagagctatgctgttttg

SEQ ID NO: 2500 - DNA, 74 bp, Artificial Sequence
  Description of Artificial Sequence: Synthetic oligonucleotide
gaaattaatacgactcactatagggatgaatacctgaatactgaagtgaaaggttttagagctatgctgttttg

SEQ ID NO: 2501 - DNA, 74 bp, Artificial Sequence
  Description of Artificial Sequence: Synthetic oligonucleotide
gaaattaatacgactcactatagggatgaataataaacccattgttaagtcagttttagagctatgctgttttg

SEQ ID NO: 2502 - DNA, 74 bp, Artificial Sequence
  Description of Artificial Sequence: Synthetic oligonucleotide
gaaattaatacgactcactatagggatgaataatgttgaaggcatagcaagcgttttagagctatgctgttttg

SEQ ID NO: 2503 - DNA, 74 bp, Artificial Sequence
  Description of Artificial Sequence: Synthetic oligonucleotide
gaaattaatacgactcactatagggatgaatacatcaagggaaaaccccagggttttagagctatgctgttttg

SEQ ID NO: 2504 - DNA, 74 bp, Artificial Sequence
  Description of Artificial Sequence: Synthetic oligonucleotide
gaaattaatacgactcactatagggatgaatatgggtggatactgagaaaaagttttagagctatgctgttttg

SEQ ID NO: 2505 - DNA, 74 bp, Artificial Sequence
  Description of Artificial Sequence: Synthetic oligonucleotide
gaaattaatacgactcactatagggatgaatacagtgaaatgaaaatcctaggttttagagctatgctgttttg

SEQ ID NO: 2506 - DNA, 74 bp, Artificial Sequence
  Description of Artificial Sequence: Synthetic oligonucleotide
gaaattaatacgactcactatagggatgaatacctcacccctccaattcagagttttagagctatgctgttttg

SEQ ID NO: 2507 - DNA, 74 bp, Artificial Sequence
  Description of Artificial Sequence: Synthetic oligonucleotide
gaaattaatacgactcactatagggatgaataaagctcacacacatcccaccgttttagagctatgctgttttg

SEQ ID NO: 2508 - DNA, 74 bp, Artificial Sequence
  Description of Artificial Sequence: Synthetic oligonucleotide
gaaattaatacgactcactatagggatgaatacggaaggtgggacttcaccagttttagagctatgctgttttg

SEQ ID NO: 2509 - DNA, 74 bp, Artificial Sequence
  Description of Artificial Sequence: Synthetic oligonucleotide
gaaattaatacgactcactatagggatgaataagtttttatgggcttgagacgttttagagctatgctgttttg

SEQ ID NO: 2510 - DNA, 74 bp, Artificial Sequence
  Description of Artificial Sequence: Synthetic oligonucleotide
gaaattaatacgactcactatagggatgaatagggtcctgagacctgtgtccgttttagagctatgctgttttg

SEQ ID NO: 2511 - DNA, 74 bp, Artificial Sequence
  Description of Artificial Sequence: Synthetic oligonucleotide
gaaattaatacgactcactatagggatgaatagtggtgaggtgggcagctgcgttttagagctatgctgttttg

SEQ ID NO: 2512 - DNA, 74 bp, Artificial Sequence
  Description of Artificial Sequence: Synthetic oligonucleotide
gaaattaatacgactcactatagggatgaataggaacagtgactttatgggagttttagagctatgctgttttg

SEQ ID NO: 2513 - DNA, 74 bp, Artificial Sequence
  Description of Artificial Sequence: Synthetic oligonucleotide
gaaattaatacgactcactatagggatgaataaattattgtgcagtataaaagttttagagctatgctgttttg

SEQ ID NO: 2514 - DNA, 74 bp, Artificial Sequence
  Description of Artificial Sequence: Synthetic oligonucleotide
gaaattaatacgactcactatagggatgaatatcatttggctctaaaggccagttttagagctatgctgttttg

SEQ ID NO: 2515 - DNA, 74 bp, Artificial Sequence
  Description of Artificial Sequence: Synthetic oligonucleotide
gaaattaatacgactcactatagggatgaataaaaattacaaagtcttcagagttttagagctatgctgttttg

SEQ ID NO: 2516 - DNA, 74 bp, Artificial Sequence
  Description of Artificial Sequence: Synthetic oligonucleotide
gaaattaatacgactcactatagggatgaatattaactagcttcaaagagcagttttagagctatgctgttttg

SEQ ID NO: 2517 - DNA, 74 bp, Artificial Sequence
  Description of Artificial Sequence: Synthetic oligonucleotide
gaaattaatacgactcactatagggatgaatatcacaacttgttctttaccagttttagagctatgctgttttg

SEQ ID NO: 2518 - DNA, 74 bp, Artificial Sequence
  Description of Artificial Sequence: Synthetic oligonucleotide
gaaattaatacgactcactatagggatgaataagagattgctttacttataggttttagagctatgctgttttg

SEQ ID NO: 2519 - DNA, 74 bp, Artificial Sequence
  Description of Artificial Sequence: Synthetic oligonucleotide
gaaattaatacgactcactatagggatgaatagaaggtttattgtgaagagagttttagagctatgctgttttg

SEQ ID NO: 2520 - DNA, 74 bp, Artificial Sequence
  Description of Artificial Sequence: Synthetic oligonucleotide
gaaattaatacgactcactatagggatgaatactaaattgctatgtttataagttttagagctatgctgttttg

SEQ ID NO: 2521 - DNA, 74 bp, Artificial Sequence
  Description of Artificial Sequence: Synthetic oligonucleotide
gaaattaatacgactcactatagggatgaatacataattctcaatagtaaaggttttagagctatgctgttttg

SEQ ID NO: 2522 - DNA, 74 bp, Artificial Sequence
  Description of Artificial Sequence: Synthetic oligonucleotide
gaaattaatacgactcactatagggatgaatattttcctctgggtataagaagttttagagctatgctgttttg

SEQ ID NO: 2523 - DNA, 74 bp, Artificial Sequence
  Description of Artificial Sequence: Synthetic oligonucleotide
gaaattaatacgactcactatagggatgaatagtagatctaatggtgactgagttttagagctatgctgttttg

SEQ ID NO: 2524 - DNA, 74 bp, Artificial Sequence
  Description of Artificial Sequence: Synthetic oligonucleotide
gaaattaatacgactcactatagggatgaatatgtccaggtaagaggccagggttttagagctatgctgttttg

SEQ ID NO: 2525 - DNA, 74 bp, Artificial Sequence
  Description of Artificial Sequence: Synthetic oligonucleotide
gaaattaatacgactcactatagggatgaataaatggctccagtctttgaccgttttagagctatgctgttttg

SEQ ID NO: 2526 - DNA, 74 bp, Artificial Sequence
  Description of Artificial Sequence: Synthetic oligonucleotide
gaaattaatacgactcactatagggatgaatagtagatctgagtttgagcccgttttagagctatgctgttttg

SEQ ID NO: 2527 - DNA, 74 bp, Artificial Sequence
  Description of Artificial Sequence: Synthetic oligonucleotide
gaaattaatacgactcactatagggatgaataatgaacaacctttagggtgcgttttagagctatgctgttttg

SEQ ID NO: 2528 - DNA, 74 bp, Artificial Sequence
  Description of Artificial Sequence: Synthetic oligonucleotide
gaaattaatacgactcactatagggatgaatagatttgaggtgtgctagtaagttttagagctatgctgttttg

SEQ ID NO: 2529 - DNA, 74 bp, Artificial Sequence
  Description of Artificial Sequence: Synthetic oligonucleotide
gaaattaatacgactcactatagggatgaataattttgcaggatggaagaaggttttagagctatgctgttttg

SEQ ID NO: 2530 - DNA, 74 bp, Artificial Sequence
  Description of Artificial Sequence: Synthetic oligonucleotide
gaaattaatacgactcactatagggatgaataaatgggactttagagcaagagttttagagctatgctgttttg

SEQ ID NO: 2531 - DNA, 74 bp, Artificial Sequence
  Description of Artificial Sequence: Synthetic oligonucleotide
gaaattaatacgactcactatagggatgaatatggctgtatatgttgtgccagttttagagctatgctgttttg

SEQ ID NO: 2532 - DNA, 74 bp, Artificial Sequence
  Description of Artificial Sequence: Synthetic oligonucleotide
gaaattaatacgactcactatagggatgaatactgattaatgggaaatgtgagttttagagctatgctgttttg

SEQ ID NO: 2533 - DNA, 74 bp, Artificial Sequence
  Description of Artificial Sequence: Synthetic oligonucleotide
gaaattaatacgactcactatagggatgaatataggtgggctattaccaaaagttttagagctatgctgttttg

SEQ ID NO: 2534 - DNA, 74 bp, Artificial Sequence
  Description of Artificial Sequence: Synthetic oligonucleotide
gaaattaatacgactcactatagggatgaatataaattgaaatgaatagtgcgttttagagctatgctgttttg

SEQ ID NO: 2535 - DNA, 74 bp, Artificial Sequence
  Description of Artificial Sequence: Synthetic oligonucleotide
gaaattaatacgactcactatagggatgaatatgtttcatggctcacaggacgttttagagctatgctgttttg

SEQ ID NO: 2536 - DNA, 74 bp, Artificial Sequence
  Description of Artificial Sequence: Synthetic oligonucleotide
gaaattaatacgactcactatagggatgaataaaaccagaaagcaaacgggagttttagagctatgctgttttg

SEQ ID NO: 2537 - DNA, 74 bp, Artificial Sequence
  Description of Artificial Sequence: Synthetic oligonucleotide
gaaattaatacgactcactatagggatgaatatgggaccaaaagctgcagacgttttagagctatgctgttttg

SEQ ID NO: 2538 - DNA, 74 bp, Artificial Sequence
  Description of Artificial Sequence: Synthetic oligonucleotide
gaaattaatacgactcactatagggatgaatacattcctgaggagagggtgcgttttagagctatgctgttttg

SEQ ID NO: 2539 - DNA, 74 bp, Artificial Sequence
  Description of Artificial Sequence: Synthetic oligonucleotide
gaaattaatacgactcactatagggatgaatatctaggactagggggacaaagttttagagctatgctgttttg

SEQ ID NO: 2540 - DNA, 74 bp, Artificial Sequence
  Description of Artificial Sequence: Synthetic oligonucleotide
gaaattaatacgactcactatagggatgaataattgaagggagtggcaggaggttttagagctatgctgttttg

SEQ ID NO: 2541 - DNA, 74 bp, Artificial Sequence
  Description of Artificial Sequence: Synthetic oligonucleotide
gaaattaatacgactcactatagggatgaatagaagtagcaagttcaagcaagttttagagctatgctgttttg

SEQ ID NO: 2542 - DNA, 74 bp, Artificial Sequence
  Description of Artificial Sequence: Synthetic oligonucleotide
gaaattaatacgactcactatagggatgaatacaagatgcttacagtcaagagttttagagctatgctgttttg

SEQ ID NO: 2543 - DNA, 74 bp, Artificial Sequence
  Description of Artificial Sequence: Synthetic oligonucleotide
gaaattaatacgactcactatagggatgaataagggaactaggatatgagacgttttagagctatgctgttttg

SEQ ID NO: 2544 - DNA, 74 bp, Artificial Sequence
  Description of Artificial Sequence: Synthetic oligonucleotide
gaaattaatacgactcactatagggatgaataaaattatcattaggagaggagttttagagctatgctgttttg

SEQ ID NO: 2545 - DNA, 74 bp, Artificial Sequence
  Description of Artificial Sequence: Synthetic oligonucleotide
gaaattaatacgactcactatagggatgaatagtatgttttaaagttagaacgttttagagctatgctgttttg

SEQ ID NO: 2546 - DNA, 74 bp, Artificial Sequence
  Description of Artificial Sequence: Synthetic oligonucleotide
gaaattaatacgactcactatagggatgaatatatcatgtctttgtagaccagttttagagctatgctgttttg

SEQ ID NO: 2547 - DNA, 74 bp, Artificial Sequence
  Description of Artificial Sequence: Synthetic oligonucleotide
gaaattaatacgactcactatagggatgaatagcgttttagaaacagacagagttttagagctatgctgttttg

SEQ ID NO: 2548 - DNA, 74 bp, Artificial Sequence
  Description of Artificial Sequence: Synthetic oligonucleotide
gaaattaatacgactcactatagggatgaataaggtgcaggtggaggtcagagttttagagctatgctgttttg

SEQ ID NO: 2549 - DNA, 74 bp, Artificial Sequence
  Description of Artificial Sequence: Synthetic oligonucleotide
gaaattaatacgactcactatagggatgaataaaatggttagtcaggggagggttttagagctatgctgttttg

SEQ ID NO: 2550 - DNA, 74 bp, Artificial Sequence
  Description of Artificial Sequence: Synthetic oligonucleotide
gaaattaatacgactcactatagggatgaataactgataataatttttgcaagttttagagctatgctgttttg

SEQ ID NO: 2551 - DNA, 74 bp, Artificial Sequence
  Description of Artificial Sequence: Synthetic oligonucleotide
gaaattaatacgactcactatagggatgaatacggccacctcagatgagagagttttagagctatgctgttttg

SEQ ID NO: 2552 - DNA, 74 bp, Artificial Sequence
  Description of Artificial Sequence: Synthetic oligonucleotide
gaaattaatacgactcactatagggatgaatagggggttgtaactgcccaaggttttagagctatgctgttttg

SEQ ID NO: 2553 - DNA, 74 bp, Artificial Sequence
  Description of Artificial Sequence: Synthetic oligonucleotide
gaaattaatacgactcactatagggatgaatagctgatttggctggctaggcgttttagagctatgctgttttg

SEQ ID NO: 2554 - DNA, 74 bp, Artificial Sequence
  Description of Artificial Sequence: Synthetic oligonucleotide
gaaattaatacgactcactatagggatgaataacataaataaatgtgggcaggttttagagctatgctgttttg

SEQ ID NO: 2555 - DNA, 74 bp, Artificial Sequence
  Description of Artificial Sequence: Synthetic oligonucleotide
gaaattaatacgactcactatagggatgaatacatgatgctaggaactatcagttttagagctatgctgttttg

SEQ ID NO: 2556 - DNA, 74 bp, Artificial Sequence
  Description of Artificial Sequence: Synthetic oligonucleotide
gaaattaatacgactcactatagggatgaatactattttttcatcaggaaaagttttagagctatgctgttttg

SEQ ID NO: 2557 - DNA, 74 bp, Artificial Sequence
  Description of Artificial Sequence: Synthetic oligonucleotide
gaaattaatacgactcactatagggatgaatacatgtaaggatgtagcaacagttttagagctatgctgttttg

SEQ ID NO: 2558 - DNA, 74 bp, Artificial Sequence
  Description of Artificial Sequence: Synthetic oligonucleotide
gaaattaatacgactcactatagggatgaatataagagtgagtaggtcctgagttttagagctatgctgttttg

SEQ ID NO: 2559 - DNA, 74 bp, Artificial Sequence
  Description of Artificial Sequence: Synthetic oligonucleotide
gaaattaatacgactcactatagggatgaataagttaattctggccttaaaggttttagagctatgctgttttg

SEQ ID NO: 2560 - DNA, 74 bp, Artificial Sequence
  Description of Artificial Sequence: Synthetic oligonucleotide
gaaattaatacgactcactatagggatgaataaagttttgggcaaaccaacagttttagagctatgctgttttg

SEQ ID NO: 2561 - DNA, 74 bp, Artificial Sequence
  Description of Artificial Sequence: Synthetic oligonucleotide
gaaattaatacgactcactatagggatgaatattatgtagagacaggcacacgttttagagctatgctgttttg

SEQ ID NO: 2562 - DNA, 74 bp, Artificial Sequence
  Description of Artificial Sequence: Synthetic oligonucleotide
gaaattaatacgactcactatagggatgaatatttctcaaagttttctgaaggttttagagctatgctgttttg

SEQ ID NO: 2563 - DNA, 74 bp, Artificial Sequence
  Description of Artificial Sequence: Synthetic oligonucleotide
gaaattaatacgactcactatagggatgaatataataataaataaataaaaagttttagagctatgctgttttg

SEQ ID NO: 2564 - DNA, 74 bp, Artificial Sequence
  Description of Artificial Sequence: Synthetic oligonucleotide
gaaattaatacgactcactatagggatgaatatctctgactatgagaaatcagttttagagctatgctgttttg

SEQ ID NO: 2565 - DNA, 74 bp, Artificial Sequence
  Description of Artificial Sequence: Synthetic oligonucleotide
gaaattaatacgactcactatagggatgaatacaagctgtactgttgagtcagttttagagctatgctgttttg

SEQ ID NO: 2566 - DNA, 74 bp, Artificial Sequence
  Description of Artificial Sequence: Synthetic oligonucleotide
gaaattaatacgactcactatagggatgaatatcttaggcaacagtggacaggttttagagctatgctgttttg

SEQ ID NO: 2567 - DNA, 74 bp, Artificial Sequence
  Description of Artificial Sequence: Synthetic oligonucleotide
gaaattaatacgactcactatagggatgaatacctcctgttatgaaaacccagttttagagctatgctgttttg

SEQ ID NO: 2568 - DNA, 74 bp, Artificial Sequence
  Description of Artificial Sequence: Synthetic oligonucleotide
gaaattaatacgactcactatagggatgaataactgctgacagagaaagacagttttagagctatgctgttttg

SEQ ID NO: 2569 - DNA, 74 bp, Artificial Sequence
  Description of Artificial Sequence: Synthetic oligonucleotide
gaaattaatacgactcactatagggatgaataccgtgtcttttgactagggcgttttagagctatgctgttttg

SEQ ID NO: 2570 - DNA, 74 bp, Artificial Sequence
  Description of Artificial Sequence: Synthetic oligonucleotide
gaaattaatacgactcactatagggatgaatagaggaatggtgtcaaaaccagttttagagctatgctgttttg

SEQ ID NO: 2571 - DNA, 74 bp, Artificial Sequence
  Description of Artificial Sequence: Synthetic oligonucleotide
gaaattaatacgactcactatagggatgaatacagtagccacaggcaccagggttttagagctatgctgttttg

SEQ ID NO: 2572 - DNA, 74 bp, Artificial Sequence
  Description of Artificial Sequence: Synthetic oligonucleotide
gaaattaatacgactcactatagggatgaatagagataataggattggcagggttttagagctatgctgttttg

SEQ ID NO: 2573 - DNA, 74 bp, Artificial Sequence
  Description of Artificial Sequence: Synthetic oligonucleotide
gaaattaatacgactcactatagggatgaatagtgcagcgcagaggccaggggttttagagctatgctgttttg

SEQ ID NO: 2574 - DNA, 74 bp, Artificial Sequence
  Description of Artificial Sequence: Synthetic oligonucleotide
gaaattaatacgactcactatagggatgaataataagaagggagttggccaagttttagagctatgctgttttg

SEQ ID NO: 2575 - DNA, 74 bp, Artificial Sequence
  Description of Artificial Sequence: Synthetic oligonucleotide
gaaattaatacgactcactatagggatgaatagttacccctggttaacaggagttttagagctatgctgttttg

SEQ ID NO: 2576 - DNA, 74 bp, Artificial Sequence
  Description of Artificial Sequence: Synthetic oligonucleotide
gaaattaatacgactcactatagggatgaataagtgacaggaaaagcaaagagttttagagctatgctgttttg

SEQ ID NO: 2577 - DNA, 74 bp, Artificial Sequence
  Description of Artificial Sequence: Synthetic oligonucleotide
gaaattaatacgactcactatagggatgaataccatctgtgtagagcggcaagttttagagctatgctgttttg

SEQ ID NO: 2578 - DNA, 74 bp, Artificial Sequence
  Description of Artificial Sequence: Synthetic oligonucleotide
gaaattaatacgactcactatagggatgaatatctgcagcattatcacaggagttttagagctatgctgttttg

SEQ ID NO: 2579 - DNA, 74 bp, Artificial Sequence
  Description of Artificial Sequence: Synthetic oligonucleotide
gaaattaatacgactcactatagggatgaatattggtgggattagaaagcaagttttagagctatgctgttttg

SEQ ID NO: 2580 - DNA, 74 bp, Artificial Sequence
  Description of Artificial Sequence: Synthetic oligonucleotide
gaaattaatacgactcactatagggatgaataaaagttgtattcaggggtgagttttagagctatgctgttttg

SEQ ID NO: 2581 - DNA, 74 bp, Artificial Sequence
  Description of Artificial Sequence: Synthetic oligonucleotide
gaaattaatacgactcactatagggatgaatatcatgaccccagacaggaaagttttagagctatgctgttttg

SEQ ID NO: 2582 - DNA, 74 bp, Artificial Sequence
  Description of Artificial Sequence: Synthetic oligonucleotide
gaaattaatacgactcactatagggatgaatataagtgagtggtggagagaagttttagagctatgctgttttg

SEQ ID NO: 2583 - DNA, 74 bp, Artificial Sequence
  Description of Artificial Sequence: Synthetic oligonucleotide
gaaattaatacgactcactatagggatgaatatttctaccaaatatttaaacgttttagagctatgctgttttg

SEQ ID NO: 2584 - DNA, 74 bp, Artificial Sequence
  Description of Artificial Sequence: Synthetic oligonucleotide
gaaattaatacgactcactatagggatgaataggaatgactgcatttaatgggttttagagctatgctgttttg

SEQ ID NO: 2585 - DNA, 74 bp, Artificial Sequence
  Description of Artificial Sequence: Synthetic oligonucleotide
gaaattaatacgactcactatagggatgaatatgtatttctgggtgctagaggttttagagctatgctgttttg

SEQ ID NO: 2586 - DNA, 74 bp, Artificial Sequence
  Description of Artificial Sequence: Synthetic oligonucleotide
gaaattaatacgactcactatagggatgaatactgactggttactacagaaagttttagagctatgctgttttg

SEQ ID NO: 2587 - DNA, 74 bp, Artificial Sequence
  Description of Artificial Sequence: Synthetic oligonucleotide
gaaattaatacgactcactatagggatgaatatctgtttgacacatgactacgttttagagctatgctgttttg

SEQ ID NO: 2588 - DNA, 74 bp, Artificial Sequence
  Description of Artificial Sequence: Synthetic oligonucleotide
gaaattaatacgactcactatagggatgaatatcattttcggctgctccagagttttagagctatgctgttttg

SEQ ID NO: 2589 - DNA, 74 bp, Artificial Sequence
  Description of Artificial Sequence: Synthetic oligonucleotide
gaaattaatacgactcactatagggatgaatatttactaaagagggaaaaaggttttagagctatgctgttttg

SEQ ID NO: 2590 - DNA, 74 bp, Artificial Sequence
  Description of Artificial Sequence: Synthetic oligonucleotide
gaaattaatacgactcactatagggatgaatatgaagcaacttatggaatgggttttagagctatgctgttttg

SEQ ID NO: 2591 - DNA, 74 bp, Artificial Sequence
  Description of Artificial Sequence: Synthetic oligonucleotide
gaaattaatacgactcactatagggatgaataagatattaactagaagagaagttttagagctatgctgttttg

SEQ ID NO: 2592 - DNA, 74 bp, Artificial Sequence
  Description of Artificial Sequence: Synthetic oligonucleotide
gaaattaatacgactcactatagggatgaataactgacaccgtaagcagcacgttttagagctatgctgttttg

SEQ ID NO: 2593 - DNA, 74 bp, Artificial Sequence
  Description of Artificial Sequence: Synthetic oligonucleotide
gaaattaatacgactcactatagggatgaatagctccaaaatcctatggaccgttttagagctatgctgttttg

SEQ ID NO: 2594 - DNA, 74 bp, Artificial Sequence
  Description of Artificial Sequence: Synthetic oligonucleotide
gaaattaatacgactcactatagggatgaataaatgtctaaagctcaccgacgttttagagctatgctgttttg

SEQ ID NO: 2595 - DNA, 74 bp, Artificial Sequence
  Description of Artificial Sequence: Synthetic oligonucleotide
gaaattaatacgactcactatagggatgaataagtttccacatcttgtaaaagttttagagctatgctgttttg

SEQ ID NO: 2596 - DNA, 74 bp, Artificial Sequence
  Description of Artificial Sequence: Synthetic oligonucleotide
gaaattaatacgactcactatagggatgaataacagttttgactatataaaagttttagagctatgctgttttg

SEQ ID NO: 2597 - DNA, 74 bp, Artificial Sequence
  Description of Artificial Sequence: Synthetic oligonucleotide
gaaattaatacgactcactatagggatgaataacaaataaaaactaaaatccgttttagagctatgctgttttg

SEQ ID NO: 2598 - DNA, 74 bp, Artificial Sequence
  Description of Artificial Sequence: Synthetic oligonucleotide
gaaattaatacgactcactatagggatgaataaattttttaaaggcaagcaggttttagagctatgctgttttg

SEQ ID NO: 2599 - DNA, 74 bp, Artificial Sequence
  Description of Artificial Sequence: Synthetic oligonucleotide
gaaattaatacgactcactatagggatgaatactataattgagttcctctaagttttagagctatgctgttttg

SEQ ID NO: 2600 - DNA, 74 bp, Artificial Sequence
  Description of Artificial Sequence: Synthetic oligonucleotide
gaaattaatacgactcactatagggatgaataatatggaggcaggggcatgagttttagagctatgctgttttg

SEQ ID NO: 2601 - DNA, 74 bp, Artificial Sequence
  Description of Artificial Sequence: Synthetic oligonucleotide
gaaattaatacgactcactatagggatgaatacattgccacttttgggctgcgttttagagctatgctgttttg

SEQ ID NO: 2602 - DNA, 74 bp, Artificial Sequence
  Description of Artificial Sequence: Synthetic oligonucleotide
gaaattaatacgactcactatagggatgaataaatatctaagtagattacaagttttagagctatgctgttttg

SEQ ID NO: 2603 - DNA, 74 bp, Artificial Sequence
  Description of Artificial Sequence: Synthetic oligonucleotide
gaaattaatacgactcactatagggatgaataagtgagggtcaccaggctaagttttagagctatgctgttttg

SEQ ID NO: 2604 - DNA, 74 bp, Artificial Sequence
  Description of Artificial Sequence: Synthetic oligonucleotide
gaaattaatacgactcactatagggatgaatagagctctcccagtagggtacgttttagagctatgctgttttg

SEQ ID NO: 2605 - DNA, 74 bp, Artificial Sequence
  Description of Artificial Sequence: Synthetic oligonucleotide
gaaattaatacgactcactatagggatgaataaggatgggtaatctctgggcgttttagagctatgctgttttg

SEQ ID NO: 2606 - DNA, 74 bp, Artificial Sequence
  Description of Artificial Sequence: Synthetic oligonucleotide
gaaattaatacgactcactatagggatgaataaagactaatgcaatcgagccgttttagagctatgctgttttg

SEQ ID NO: 2607 - DNA, 74 bp, Artificial Sequence
  Description of Artificial Sequence: Synthetic oligonucleotide
gaaattaatacgactcactatagggatgaataatagaatgtaaattccatacgttttagagctatgctgttttg

SEQ ID NO: 2608 - DNA, 74 bp, Artificial Sequence
  Description of Artificial Sequence: Synthetic oligonucleotide
gaaattaatacgactcactatagggatgaatattggaatggggctatacagagttttagagctatgctgttttg

SEQ ID NO: 2609 - DNA, 74 bp, Artificial Sequence
  Description of Artificial Sequence: Synthetic oligonucleotide
gaaattaatacgactcactatagggatgaatatctcaaggtatgcaatgacagttttagagctatgctgttttg

SEQ ID NO: 2610 - DNA, 74 bp, Artificial Sequence
  Description of Artificial Sequence: Synthetic oligonucleotide
gaaattaatacgactcactatagggatgaatagtttcagggctgtgatgaaagttttagagctatgctgttttg

SEQ ID NO: 2611 - DNA, 74 bp, Artificial Sequence
  Description of Artificial Sequence: Synthetic oligonucleotide
gaaattaatacgactcactatagggatgaatagtaaaacaagcctgcagtgagttttagagctatgctgttttg

SEQ ID NO: 2612 - DNA, 74 bp, Artificial Sequence
  Description of Artificial Sequence: Synthetic oligonucleotide
gaaattaatacgactcactatagggatgaataccttgaccttgatacaaagcgttttagagctatgctgttttg

SEQ ID NO: 2613 - DNA, 74 bp, Artificial Sequence
  Description of Artificial Sequence: Synthetic oligonucleotide
gaaattaatacgactcactatagggatgaataagtctcagaaattggagcgggttttagagctatgctgttttg

SEQ ID NO: 2614 - DNA, 74 bp, Artificial Sequence
  Description of Artificial Sequence: Synthetic oligonucleotide
gaaattaatacgactcactatagggatgaatagatgacttaggctttgcccagttttagagctatgctgttttg

SEQ ID NO: 2615 - DNA, 74 bp, Artificial Sequence
  Description of Artificial Sequence: Synthetic oligonucleotide
gaaattaatacgactcactatagggatgaatatgtcacgttttatggcacaagttttagagctatgctgttttg

SEQ ID NO: 2616 - DNA, 74 bp, Artificial Sequence
  Description of Artificial Sequence: Synthetic oligonucleotide
gaaattaatacgactcactatagggatgaatatttatgataaatattactgagttttagagctatgctgttttg

SEQ ID NO: 2617 - DNA, 74 bp, Artificial Sequence
  Description of Artificial Sequence: Synthetic oligonucleotide
gaaattaatacgactcactatagggatgaatatattatgcaataacagataggttttagagctatgctgttttg

SEQ ID NO: 2618 - DNA, 74 bp, Artificial Sequence
  Description of Artificial Sequence: Synthetic oligonucleotide
gaaattaatacgactcactatagggatgaataaggaagcacggagttgaggagttttagagctatgctgttttg

SEQ ID NO: 2619 - DNA, 74 bp, Artificial Sequence
  Description of Artificial Sequence: Synthetic oligonucleotide
gaaattaatacgactcactatagggatgaataacttgaaaacactgctgtcagttttagagctatgctgttttg

SEQ ID NO: 2620 - DNA, 74 bp, Artificial Sequence
  Description of Artificial Sequence: Synthetic oligonucleotide
gaaattaatacgactcactatagggatgaataccaaatactgtatgaaacacgttttagagctatgctgttttg

SEQ ID NO: 2621 - DNA, 74 bp, Artificial Sequence
  Description of Artificial Sequence: Synthetic oligonucleotide
gaaattaatacgactcactatagggatgaataggtgagtatcacggttgtcagttttagagctatgctgttttg

SEQ ID NO: 2622 - DNA, 74 bp, Artificial Sequence
  Description of Artificial Sequence: Synthetic oligonucleotide
gaaattaatacgactcactatagggatgaataaagagctcaaaaaagtccaagttttagagctatgctgttttg

SEQ ID NO: 2623 - DNA, 74 bp, Artificial Sequence
  Description of Artificial Sequence: Synthetic oligonucleotide
gaaattaatacgactcactatagggatgaatattggttggtcctcaaggcaagttttagagctatgctgttttg

SEQ ID NO: 2624 - DNA, 74 bp, Artificial Sequence
  Description of Artificial Sequence: Synthetic oligonucleotide
gaaattaatacgactcactatagggatgaataagggatatatactagcgcccgttttagagctatgctgttttg

SEQ ID NO: 2625 - DNA, 74 bp, Artificial Sequence
  Description of Artificial Sequence: Synthetic oligonucleotide
gaaattaatacgactcactatagggatgaataacatgaaaatcagctccagggttttagagctatgctgttttg

SEQ ID NO: 2626 - DNA, 74 bp, Artificial Sequence
  Description of Artificial Sequence: Synthetic oligonucleotide
gaaattaatacgactcactatagggatgaatattgaaagtacttttcaaaaagttttagagctatgctgttttg

SEQ ID NO: 2627 - DNA, 74 bp, Artificial Sequence
  Description of Artificial Sequence: Synthetic oligonucleotide
gaaattaatacgactcactatagggatgaatatagtaattaaggcagtggcagttttagagctatgctgttttg

SEQ ID NO: 2628 - DNA, 74 bp, Artificial Sequence
  Description of Artificial Sequence: Synthetic oligonucleotide
gaaattaatacgactcactatagggatgaatagggtgggatcaaccgtctacgttttagagctatgctgttttg

SEQ ID NO: 2629 - DNA, 74 bp, Artificial Sequence
  Description of Artificial Sequence: Synthetic oligonucleotide
gaaattaatacgactcactatagggatgaataaggacagacacaagtgatcagttttagagctatgctgttttg

SEQ ID NO: 2630 - DNA, 74 bp, Artificial Sequence
  Description of Artificial Sequence: Synthetic oligonucleotide
gaaattaatacgactcactatagggatgaatataggcacacattaatgggccgttttagagctatgctgttttg

SEQ ID NO: 2631 - DNA, 74 bp, Artificial Sequence
  Description of Artificial Sequence: Synthetic oligonucleotide
gaaattaatacgactcactatagggatgaatagcaaaaatcagagtgaagaggttttagagctatgctgttttg

SEQ ID NO: 2632 - DNA, 74 bp, Artificial Sequence
  Description of Artificial Sequence: Synthetic oligonucleotide
gaaattaatacgactcactatagggatgaataaaagaacacacattctggccgttttagagctatgctgttttg

SEQ ID NO: 2633 - DNA, 74 bp, Artificial Sequence
  Description of Artificial Sequence: Synthetic oligonucleotide
gaaattaatacgactcactatagggatgaataagagcctctggggtacataggttttagagctatgctgttttg

SEQ ID NO: 2634 - DNA, 74 bp, Artificial Sequence
  Description of Artificial Sequence: Synthetic oligonucleotide
gaaattaatacgactcactatagggatgaataaatacttacctacttaagaggttttagagctatgctgttttg

SEQ ID NO: 2635 - DNA, 74 bp, Artificial Sequence
  Description of Artificial Sequence: Synthetic oligonucleotide
gaaattaatacgactcactatagggatgaataggactttccatctaagcccagttttagagctatgctgttttg

SEQ ID NO: 2636 - DNA, 74 bp, Artificial Sequence
  Description of Artificial Sequence: Synthetic oligonucleotide
gaaattaatacgactcactatagggatgaatactagagcaggccaagggaaggttttagagctatgctgttttg

SEQ ID NO: 2637 - DNA, 74 bp, Artificial Sequence
  Description of Artificial Sequence: Synthetic oligonucleotide
gaaattaatacgactcactatagggatgaatagttgtatgaactctgactccgttttagagctatgctgttttg

SEQ ID NO: 2638 - DNA, 74 bp, Artificial Sequence
  Description of Artificial Sequence: Synthetic oligonucleotide
gaaattaatacgactcactatagggatgaatagagagaagtcctaaaacgccgttttagagctatgctgttttg

SEQ ID NO: 2639 - DNA, 74 bp, Artificial Sequence
  Description of Artificial Sequence: Synthetic oligonucleotide
gaaattaatacgactcactatagggatgaataagagcttatgctcttaatcagttttagagctatgctgttttg

SEQ ID NO: 2640 - DNA, 74 bp, Artificial Sequence
  Description of Artificial Sequence: Synthetic oligonucleotide
gaaattaatacgactcactatagggatgaatacagaaaatggtttctggaaagttttagagctatgctgttttg

SEQ ID NO: 2641 - DNA, 74 bp, Artificial Sequence
  Description of Artificial Sequence: Synthetic oligonucleotide
gaaattaatacgactcactatagggatgaatatctcagagacccacgagccggttttagagctatgctgttttg

SEQ ID NO: 2642 - DNA, 74 bp, Artificial Sequence
  Description of Artificial Sequence: Synthetic oligonucleotide
gaaattaatacgactcactatagggatgaataaatatattcgttctgtggcagttttagagctatgctgttttg

SEQ ID NO: 2643 - DNA, 74 bp, Artificial Sequence
  Description of Artificial Sequence: Synthetic oligonucleotide
gaaattaatacgactcactatagggatgaatatgtattttctcagcatggcagttttagagctatgctgttttg

SEQ ID NO: 2644 - DNA, 74 bp, Artificial Sequence
  Description of Artificial Sequence: Synthetic oligonucleotide
gaaattaatacgactcactatagggatgaatataggcaggtactgatccccggttttagagctatgctgttttg

SEQ ID NO: 2645 - DNA, 74 bp, Artificial Sequence
  Description of Artificial Sequence: Synthetic oligonucleotide
gaaattaatacgactcactatagggatgaatagggcacatacttcaggcagagttttagagctatgctgttttg

SEQ ID NO: 2646 - DNA, 74 bp, Artificial Sequence
  Description of Artificial Sequence: Synthetic oligonucleotide
gaaattaatacgactcactatagggatgaataaagtattggtaagcaaaagggttttagagctatgctgttttg

SEQ ID NO: 2647 - DNA, 74 bp, Artificial Sequence
  Description of Artificial Sequence: Synthetic oligonucleotide
gaaattaatacgactcactatagggatgaatatttcaggattgttggtaaccgttttagagctatgctgttttg

SEQ ID NO: 2648 - DNA, 74 bp, Artificial Sequence
  Description of Artificial Sequence: Synthetic oligonucleotide
gaaattaatacgactcactatagggatgaatattagaacttcctacagatgggttttagagctatgctgttttg

SEQ ID NO: 2649 - DNA, 74 bp, Artificial Sequence
  Description of Artificial Sequence: Synthetic oligonucleotide
gaaattaatacgactcactatagggatgaatagtgtgcctcagtactggaccgttttagagctatgctgttttg

SEQ ID NO: 2650 - DNA, 74 bp, Artificial Sequence
  Description of Artificial Sequence: Synthetic oligonucleotide
gaaattaatacgactcactatagggatgaatagggccactccatccggacccgttttagagctatgctgttttg

SEQ ID NO: 2651 - DNA, 74 bp, Artificial Sequence
  Description of Artificial Sequence: Synthetic oligonucleotide
gaaattaatacgactcactatagggatgaatagtggaagaaagaggagcagggttttagagctatgctgttttg

SEQ ID NO: 2652 - DNA, 74 bp, Artificial Sequence
  Description of Artificial Sequence: Synthetic oligonucleotide
gaaattaatacgactcactatagggatgaataaaagtagtgcaggctggccagttttagagctatgctgttttg

SEQ ID NO: 2653 - DNA, 74 bp, Artificial Sequence
  Description of Artificial Sequence: Synthetic oligonucleotide
gaaattaatacgactcactatagggatgaataagtcgatgactgaacaaaaagttttagagctatgctgttttg

SEQ ID NO: 2654 - DNA, 74 bp, Artificial Sequence
  Description of Artificial Sequence: Synthetic oligonucleotide
gaaattaatacgactcactatagggatgaatactttggactgggtgatgtaagttttagagctatgctgttttg

SEQ ID NO: 2655 - DNA, 74 bp, Artificial Sequence
  Description of Artificial Sequence: Synthetic oligonucleotide
gaaattaatacgactcactatagggatgaatatcgggagatgctcccaagacgttttagagctatgctgttttg

SEQ ID NO: 2656 - DNA, 74 bp, Artificial Sequence
  Description of Artificial Sequence: Synthetic oligonucleotide
gaaattaatacgactcactatagggatgaatagtatcataaatgaatgaagcgttttagagctatgctgttttg

SEQ ID NO: 2657 - DNA, 74 bp, Artificial Sequence
  Description of Artificial Sequence: Synthetic oligonucleotide
gaaattaatacgactcactatagggatgaatactgaagatggcttcacaggagttttagagctatgctgttttg

SEQ ID NO: 2658 - DNA, 74 bp, Artificial Sequence
  Description of Artificial Sequence: Synthetic oligonucleotide
gaaattaatacgactcactatagggatgaatatgggatatcaatggaaacaggttttagagctatgctgttttg

SEQ ID NO: 2659 - DNA, 74 bp, Artificial Sequence
  Description of Artificial Sequence: Synthetic oligonucleotide
gaaattaatacgactcactatagggatgaatatctgtgaaactaattaaggagttttagagctatgctgttttg

SEQ ID NO: 2660 - DNA, 74 bp, Artificial Sequence
  Description of Artificial Sequence: Synthetic oligonucleotide
gaaattaatacgactcactatagggatgaatacagacaactgcagtcagccggttttagagctatgctgttttg

SEQ ID NO: 2661 - DNA, 74 bp, Artificial Sequence
  Description of Artificial Sequence: Synthetic oligonucleotide
gaaattaatacgactcactatagggatgaataccattcagattgccttgaaggttttagagctatgctgttttg

SEQ ID NO: 2662 - DNA, 74 bp, Artificial Sequence
  Description of Artificial Sequence: Synthetic oligonucleotide
gaaattaatacgactcactatagggatgaatatctcttggggatgggtgggagttttagagctatgctgttttg

SEQ ID NO: 2663 - DNA, 74 bp, Artificial Sequence
  Description of Artificial Sequence: Synthetic oligonucleotide
gaaattaatacgactcactatagggatgaatagtgaatctctgttcccaaacgttttagagctatgctgttttg

SEQ ID NO: 2664 - DNA, 74 bp, Artificial Sequence
  Description of Artificial Sequence: Synthetic oligonucleotide
gaaattaatacgactcactatagggatgaatacaagttcaaagtggtactccgttttagagctatgctgttttg

SEQ ID NO: 2665 - DNA, 74 bp, Artificial Sequence
  Description of Artificial Sequence: Synthetic oligonucleotide
gaaattaatacgactcactatagggatgaatattggactctggatggggcgcgttttagagctatgctgttttg

SEQ ID NO: 2666 - DNA, 74 bp, Artificial Sequence
  Description of Artificial Sequence: Synthetic oligonucleotide
gaaattaatacgactcactatagggatgaatagctgacttgagaggacacacgttttagagctatgctgttttg

SEQ ID NO: 2667 - DNA, 74 bp, Artificial Sequence
  Description of Artificial Sequence: Synthetic oligonucleotide
gaaattaatacgactcactatagggatgaatagggccaggcggtcttggggggttttagagctatgctgttttg

SEQ ID NO: 2668 - DNA, 74 bp, Artificial Sequence
  Description of Artificial Sequence: Synthetic oligonucleotide
gaaattaatacgactcactatagggatgaatattggcgacctccgtccagccgttttagagctatgctgttttg

SEQ ID NO: 2669 - DNA, 74 bp, Artificial Sequence
  Description of Artificial Sequence: Synthetic oligonucleotide
gaaattaatacgactcactatagggatgaatatctgcaccatatactggtgggttttagagctatgctgttttg

SEQ ID NO: 2670 - DNA, 74 bp, Artificial Sequence
  Description of Artificial Sequence: Synthetic oligonucleotide
gaaattaatacgactcactatagggatgaatacaggcatgagctaccgcgccgttttagagctatgctgttttg

SEQ ID NO: 2671 - DNA, 74 bp, Artificial Sequence
  Description of Artificial Sequence: Synthetic oligonucleotide
gaaattaatacgactcactatagggatgaatatcgcatcaacaaggcagagggttttagagctatgctgttttg

SEQ ID NO: 2672 - DNA, 74 bp, Artificial Sequence
  Description of Artificial Sequence: Synthetic oligonucleotide
gaaattaatacgactcactatagggatgaatattacatttttggggggaggcgttttagagctatgctgttttg

SEQ ID NO: 2673 - DNA, 74 bp, Artificial Sequence
  Description of Artificial Sequence: Synthetic oligonucleotide
gaaattaatacgactcactatagggatgaatatcaaggaggaagtatggggggttttagagctatgctgttttg

SEQ ID NO: 2674 - DNA, 74 bp, Artificial Sequence
  Description of Artificial Sequence: Synthetic oligonucleotide
gaaattaatacgactcactatagggatgaataatagagaagttggtgggtgagttttagagctatgctgttttg

SEQ ID NO: 2675 - DNA, 74 bp, Artificial Sequence
  Description of Artificial Sequence: Synthetic oligonucleotide
gaaattaatacgactcactatagggatgaatatcagttagctactcccagcagttttagagctatgctgttttg

SEQ ID NO: 2676 - DNA, 74 bp, Artificial Sequence
  Description of Artificial Sequence: Synthetic oligonucleotide
gaaattaatacgactcactatagggatgaatacagtgcttttaatgggacaggttttagagctatgctgttttg

SEQ ID NO: 2677 - DNA, 74 bp, Artificial Sequence
  Description of Artificial Sequence: Synthetic oligonucleotide
gaaattaatacgactcactatagggatgaatagaattctagtgcttctcagggttttagagctatgctgttttg

SEQ ID NO: 2678 - DNA, 74 bp, Artificial Sequence
  Description of Artificial Sequence: Synthetic oligonucleotide
gaaattaatacgactcactatagggatgaatatggctcagaactaacaggcagttttagagctatgctgttttg

SEQ ID NO: 2679 - DNA, 74 bp, Artificial Sequence
  Description of Artificial Sequence: Synthetic oligonucleotide
gaaattaatacgactcactatagggatgaataatgctaggggtgagggctgcgttttagagctatgctgttttg

SEQ ID NO: 2680 - DNA, 74 bp, Artificial Sequence
  Description of Artificial Sequence: Synthetic oligonucleotide
gaaattaatacgactcactatagggatgaatactagcagctagctagggccagttttagagctatgctgttttg

SEQ ID NO: 2681 - DNA, 74 bp, Artificial Sequence
  Description of Artificial Sequence: Synthetic oligonucleotide
gaaattaatacgactcactatagggatgaataaggcaagaagaagtttcggagttttagagctatgctgttttg

SEQ ID NO: 2682 - DNA, 74 bp, Artificial Sequence
  Description of Artificial Sequence: Synthetic oligonucleotide
gaaattaatacgactcactatagggatgaatatatagggagaatatgtaagagttttagagctatgctgttttg

SEQ ID NO: 2683 - DNA, 74 bp, Artificial Sequence
  Description of Artificial Sequence: Synthetic oligonucleotide
gaaattaatacgactcactatagggatgaataaaaaaggaggaaaataaaaggttttagagctatgctgttttg

SEQ ID NO: 2684 - DNA, 74 bp, Artificial Sequence
  Description of Artificial Sequence: Synthetic oligonucleotide
gaaattaatacgactcactatagggatgaatataattgcctttaaattccccgttttagagctatgctgttttg

SEQ ID NO: 2685 - DNA, 74 bp, Artificial Sequence
  Description of Artificial Sequence: Synthetic oligonucleotide
gaaattaatacgactcactatagggatgaatattttcatgtacagggtctacgttttagagctatgctgttttg

SEQ ID NO: 2686 - DNA, 74 bp, Artificial Sequence
  Description of Artificial Sequence: Synthetic oligonucleotide
gaaattaatacgactcactatagggatgaatatcgagaagcagggctggacagttttagagctatgctgttttg

SEQ ID NO: 2687 - DNA, 74 bp, Artificial Sequence
  Description of Artificial Sequence: Synthetic oligonucleotide
gaaattaatacgactcactatagggatgaatatagctaaaaaacagtggaacgttttagagctatgctgttttg

SEQ ID NO: 2688 - DNA, 74 bp, Artificial Sequence
  Description of Artificial Sequence: Synthetic oligonucleotide
gaaattaatacgactcactatagggatgaatattgctactggggagataggggttttagagctatgctgttttg

SEQ ID NO: 2689 - DNA, 74 bp, Artificial Sequence
  Description of Artificial Sequence: Synthetic oligonucleotide
gaaattaatacgactcactatagggatgaatagttggcactgtggggaaggagttttagagctatgctgttttg

SEQ ID NO: 2690 - DNA, 74 bp, Artificial Sequence
  Description of Artificial Sequence: Synthetic oligonucleotide
gaaattaatacgactcactatagggatgaatattgccccatcttgttgccaagttttagagctatgctgttttg

SEQ ID NO: 2691 - DNA, 74 bp, Artificial Sequence
  Description of Artificial Sequence: Synthetic oligonucleotide
gaaattaatacgactcactatagggatgaatattgtcttggctatcagaaccgttttagagctatgctgttttg

SEQ ID NO: 2692 - DNA, 74 bp, Artificial Sequence
  Description of Artificial Sequence: Synthetic oligonucleotide
gaaattaatacgactcactatagggatgaatatttctcttaggcctgcgggcgttttagagctatgctgttttg

SEQ ID NO: 2693 - DNA, 74 bp, Artificial Sequence
  Description of Artificial Sequence: Synthetic oligonucleotide
gaaattaatacgactcactatagggatgaataaggctggagctggagcagccgttttagagctatgctgttttg

SEQ ID NO: 2694 - DNA, 74 bp, Artificial Sequence
  Description of Artificial Sequence: Synthetic oligonucleotide
gaaattaatacgactcactatagggatgaataaggcttctacttaggcacccgttttagagctatgctgttttg

SEQ ID NO: 2695 - DNA, 74 bp, Artificial Sequence
  Description of Artificial Sequence: Synthetic oligonucleotide
gaaattaatacgactcactatagggatgaataccatgccaggatctggaggagttttagagctatgctgttttg

SEQ ID NO: 2696 - DNA, 74 bp, Artificial Sequence
  Description of Artificial Sequence: Synthetic oligonucleotide
gaaattaatacgactcactatagggatgaataaagatgcaactggacaagcagttttagagctatgctgttttg

SEQ ID NO: 2697 - DNA, 74 bp, Artificial Sequence
  Description of Artificial Sequence: Synthetic oligonucleotide
gaaattaatacgactcactatagggatgaatagagaccacacagttagggaggttttagagctatgctgttttg

SEQ ID NO: 2698 - DNA, 74 bp, Artificial Sequence
  Description of Artificial Sequence: Synthetic oligonucleotide
gaaattaatacgactcactatagggatgaatagaaagctcttgagtagacccgttttagagctatgctgttttg

SEQ ID NO: 2699 - DNA, 74 bp, Artificial Sequence
  Description of Artificial Sequence: Synthetic oligonucleotide
gaaattaatacgactcactatagggatgaatagagggggcttttgggtgagagttttagagctatgctgttttg

SEQ ID NO: 2700 - DNA, 74 bp, Artificial Sequence
  Description of Artificial Sequence: Synthetic oligonucleotide
gaaattaatacgactcactatagggatgaatattgctctcactgtttcatgagttttagagctatgctgttttg

SEQ ID NO: 2701 - DNA, 74 bp, Artificial Sequence
  Description of Artificial Sequence: Synthetic oligonucleotide
gaaattaatacgactcactatagggatgaatagtgtgagtgccccacagtgggttttagagctatgctgttttg

SEQ ID NO: 2702 - DNA, 74 bp, Artificial Sequence
  Description of Artificial Sequence: Synthetic oligonucleotide
gaaattaatacgactcactatagggatgaatatcaggaggtagcctgaagaggttttagagctatgctgttttg

SEQ ID NO: 2703 - DNA, 74 bp, Artificial Sequence
  Description of Artificial Sequence: Synthetic oligonucleotide
gaaattaatacgactcactatagggatgaatagatgctttgtttcaccaagcgttttagagctatgctgttttg

SEQ ID NO: 2704 - DNA, 74 bp, Artificial Sequence
  Description of Artificial Sequence: Synthetic oligonucleotide
gaaattaatacgactcactatagggatgaatacagaaggttagctcatcaccgttttagagctatgctgttttg

SEQ ID NO: 2705 - DNA, 74 bp, Artificial Sequence
  Description of Artificial Sequence: Synthetic oligonucleotide
gaaattaatacgactcactatagggatgaataacacaggatgaagcaaacacgttttagagctatgctgttttg

SEQ ID NO: 2706 - DNA, 74 bp, Artificial Sequence
  Description of Artificial Sequence: Synthetic oligonucleotide
gaaattaatacgactcactatagggatgaataaaacaggagaatctgtctcagttttagagctatgctgttttg

SEQ ID NO: 2707 - DNA, 74 bp, Artificial Sequence
  Description of Artificial Sequence: Synthetic oligonucleotide
gaaattaatacgactcactatagggatgaatatcatgtgtccctactgctgagttttagagctatgctgttttg

SEQ ID NO: 2708 - DNA, 74 bp, Artificial Sequence
  Description of Artificial Sequence: Synthetic oligonucleotide
gaaattaatacgactcactatagggatgaatatctgggacattcttgactgagttttagagctatgctgttttg

SEQ ID NO: 2709 - DNA, 74 bp, Artificial Sequence
  Description of Artificial Sequence: Synthetic oligonucleotide
gaaattaatacgactcactatagggatgaataatgtctgctggacaggacacgttttagagctatgctgttttg

SEQ ID NO: 2710 - DNA, 74 bp, Artificial Sequence
  Description of Artificial Sequence: Synthetic oligonucleotide
gaaattaatacgactcactatagggatgaataatgagtggagtttggggtacgttttagagctatgctgttttg

SEQ ID NO: 2711 - DNA, 74 bp, Artificial Sequence
  Description of Artificial Sequence: Synthetic oligonucleotide
gaaattaatacgactcactatagggatgaataaaaggtcattggaggaacacgttttagagctatgctgttttg

SEQ ID NO: 2712 - DNA, 74 bp, Artificial Sequence
  Description of Artificial Sequence: Synthetic oligonucleotide
gaaattaatacgactcactatagggatgaatactgtcacagagggaaggcccgttttagagctatgctgttttg

SEQ ID NO: 2713 - DNA, 74 bp, Artificial Sequence
  Description of Artificial Sequence: Synthetic oligonucleotide
gaaattaatacgactcactatagggatgaatacaggtctagcagtgaagagagttttagagctatgctgttttg

SEQ ID NO: 2714 - DNA, 74 bp, Artificial Sequence
  Description of Artificial Sequence: Synthetic oligonucleotide
gaaattaatacgactcactatagggatgaatacaattagcgcatgaatgtgggttttagagctatgctgttttg

SEQ ID NO: 2715 - DNA, 74 bp, Artificial Sequence
  Description of Artificial Sequence: Synthetic oligonucleotide
gaaattaatacgactcactatagggatgaataatatgagcaaaaatggatccgttttagagctatgctgttttg

SEQ ID NO: 2716 - DNA, 74 bp, Artificial Sequence
  Description of Artificial Sequence: Synthetic oligonucleotide
gaaattaatacgactcactatagggatgaatactggaagtctggatggaaaagttttagagctatgctgttttg

SEQ ID NO: 2717 - DNA, 74 bp, Artificial Sequence
  Description of Artificial Sequence: Synthetic oligonucleotide
gaaattaatacgactcactatagggatgaatattgtagaggtttgattatgagttttagagctatgctgttttg

SEQ ID NO: 2718 - DNA, 74 bp, Artificial Sequence
  Description of Artificial Sequence: Synthetic oligonucleotide
gaaattaatacgactcactatagggatgaatagtttcattgtatagacgccagttttagagctatgctgttttg

SEQ ID NO: 2719 - DNA, 74 bp, Artificial Sequence
  Description of Artificial Sequence: Synthetic oligonucleotide
gaaattaatacgactcactatagggatgaataccactcacctcccgctgcccgttttagagctatgctgttttg

SEQ ID NO: 2720 - DNA, 74 bp, Artificial Sequence
  Description of Artificial Sequence: Synthetic oligonucleotide
gaaattaatacgactcactatagggatgaataccattaccccacacctgaacgttttagagctatgctgttttg

SEQ ID NO: 2721 - DNA, 74 bp, Artificial Sequence
  Description of Artificial Sequence: Synthetic oligonucleotide
gaaattaatacgactcactatagggatgaataattcacatgtatattaaagcgttttagagctatgctgttttg

SEQ ID NO: 2722 - DNA, 74 bp, Artificial Sequence
  Description of Artificial Sequence: Synthetic oligonucleotide
gaaattaatacgactcactatagggatgaatactgggtgatgaagatgacaggttttagagctatgctgttttg

SEQ ID NO: 2723 - DNA, 74 bp, Artificial Sequence
  Description of Artificial Sequence: Synthetic oligonucleotide
gaaattaatacgactcactatagggatgaatagcagcttcccttctagaagagttttagagctatgctgttttg

SEQ ID NO: 2724 - DNA, 74 bp, Artificial Sequence
  Description of Artificial Sequence: Synthetic oligonucleotide
gaaattaatacgactcactatagggatgaatactaactaggtggctaaacaggttttagagctatgctgttttg

SEQ ID NO: 2725 - DNA, 74 bp, Artificial Sequence
  Description of Artificial Sequence: Synthetic oligonucleotide
gaaattaatacgactcactatagggatgaatagaggctgtgatgctgagcccgttttagagctatgctgttttg

SEQ ID NO: 2726 - DNA, 74 bp, Artificial Sequence
  Description of Artificial Sequence: Synthetic oligonucleotide
gaaattaatacgactcactatagggatgaatactttgctcatagctgtctccgttttagagctatgctgttttg

SEQ ID NO: 2727 - DNA, 74 bp, Artificial Sequence
  Description of Artificial Sequence: Synthetic oligonucleotide
gaaattaatacgactcactatagggatgaatagctggttacctcagtggcaagttttagagctatgctgttttg

SEQ ID NO: 2728 - DNA, 74 bp, Artificial Sequence
  Description of Artificial Sequence: Synthetic oligonucleotide
gaaattaatacgactcactatagggatgaatagtggccacttcttgtggagagttttagagctatgctgttttg

SEQ ID NO: 2729 - DNA, 74 bp, Artificial Sequence
  Description of Artificial Sequence: Synthetic oligonucleotide
gaaattaatacgactcactatagggatgaatagagtgtgatcactcgcaaaggttttagagctatgctgttttg

SEQ ID NO: 2730 - DNA, 74 bp, Artificial Sequence
  Description of Artificial Sequence: Synthetic oligonucleotide
gaaattaatacgactcactatagggatgaataggactagctcattatggcaagttttagagctatgctgttttg

SEQ ID NO: 2731 - DNA, 74 bp, Artificial Sequence
  Description of Artificial Sequence: Synthetic oligonucleotide
gaaattaatacgactcactatagggatgaatacagactctgtcattaggggagttttagagctatgctgttttg

SEQ ID NO: 2732 - DNA, 74 bp, Artificial Sequence
  Description of Artificial Sequence: Synthetic oligonucleotide
gaaattaatacgactcactatagggatgaataacattaacatagtagcacaggttttagagctatgctgttttg

SEQ ID NO: 2733 - DNA, 74 bp, Artificial Sequence
  Description of Artificial Sequence: Synthetic oligonucleotide
gaaattaatacgactcactatagggatgaatactatctccccataggtaaaagttttagagctatgctgttttg

SEQ ID NO: 2734 - DNA, 74 bp, Artificial Sequence
  Description of Artificial Sequence: Synthetic oligonucleotide
gaaattaatacgactcactatagggatgaataatgaaatctgaagagtgagcgttttagagctatgctgttttg

SEQ ID NO: 2735 - DNA, 74 bp, Artificial Sequence
  Description of Artificial Sequence: Synthetic oligonucleotide
gaaattaatacgactcactatagggatgaataatttgatgggggagtccagcgttttagagctatgctgttttg

SEQ ID NO: 2736 - DNA, 74 bp, Artificial Sequence
  Description of Artificial Sequence: Synthetic oligonucleotide
gaaattaatacgactcactatagggatgaatatcagtgatacaggtgcaagcgttttagagctatgctgttttg

SEQ ID NO: 2737 - DNA, 74 bp, Artificial Sequence
  Description of Artificial Sequence: Synthetic oligonucleotide
gaaattaatacgactcactatagggatgaataaaggtgccaaaaaatgagacgttttagagctatgctgttttg

SEQ ID NO: 2738 - DNA, 74 bp, Artificial Sequence
  Description of Artificial Sequence: Synthetic oligonucleotide
gaaattaatacgactcactatagggatgaatacctcgctgtctgatgaggcagttttagagctatgctgttttg

SEQ ID NO: 2739 - DNA, 74 bp, Artificial Sequence
  Description of Artificial Sequence: Synthetic oligonucleotide
gaaattaatacgactcactatagggatgaataattggaagacccactcctgagttttagagctatgctgttttg

SEQ ID NO: 2740 - DNA, 74 bp, Artificial Sequence
  Description of Artificial Sequence: Synthetic oligonucleotide
gaaattaatacgactcactatagggatgaatatttagagctcaaacttggaggttttagagctatgctgttttg

SEQ ID NO: 2741 - DNA, 74 bp, Artificial Sequence
  Description of Artificial Sequence: Synthetic oligonucleotide
gaaattaatacgactcactatagggatgaatactgtctcagcatagccctgcgttttagagctatgctgttttg

SEQ ID NO: 2742 - DNA, 74 bp, Artificial Sequence
  Description of Artificial Sequence: Synthetic oligonucleotide
gaaattaatacgactcactatagggatgaatatatagagatagcctttagcagttttagagctatgctgttttg

SEQ ID NO: 2743 - DNA, 74 bp, Artificial Sequence
  Description of Artificial Sequence: Synthetic oligonucleotide
gaaattaatacgactcactatagggatgaataatgcaaggaggataaacacagttttagagctatgctgttttg

SEQ ID NO: 2744 - DNA, 74 bp, Artificial Sequence
  Description of Artificial Sequence: Synthetic oligonucleotide
gaaattaatacgactcactatagggatgaataatttaagttttcataaaggagttttagagctatgctgttttg

SEQ ID NO: 2745 - DNA, 74 bp, Artificial Sequence
  Description of Artificial Sequence: Synthetic oligonucleotide
gaaattaatacgactcactatagggatgaatagtgtgttgcccgaggtgaaggttttagagctatgctgttttg

SEQ ID NO: 2746 - DNA, 74 bp, Artificial Sequence
  Description of Artificial Sequence: Synthetic oligonucleotide
gaaattaatacgactcactatagggatgaatataacattgggctggtgacaggttttagagctatgctgttttg

SEQ ID NO: 2747 - DNA, 74 bp, Artificial Sequence
  Description of Artificial Sequence: Synthetic oligonucleotide
gaaattaatacgactcactatagggatgaatatggaaggtgttggacgctgagttttagagctatgctgttttg

SEQ ID NO: 2748 - DNA, 74 bp, Artificial Sequence
  Description of Artificial Sequence: Synthetic oligonucleotide
gaaattaatacgactcactatagggatgaatacagagtgaacaggtctctgcgttttagagctatgctgttttg

SEQ ID NO: 2749 - DNA, 74 bp, Artificial Sequence
  Description of Artificial Sequence: Synthetic oligonucleotide
gaaattaatacgactcactatagggatgaatagcttggcccatctgggctgggttttagagctatgctgttttg

SEQ ID NO: 2750 - DNA, 74 bp, Artificial Sequence
  Description of Artificial Sequence: Synthetic oligonucleotide
gaaattaatacgactcactatagggatgaatactaccaaagaggataacaccgttttagagctatgctgttttg

SEQ ID NO: 2751 - DNA, 74 bp, Artificial Sequence
  Description of Artificial Sequence: Synthetic oligonucleotide
gaaattaatacgactcactatagggatgaataggatctgcagggagggacacgttttagagctatgctgttttg

SEQ ID NO: 2752 - DNA, 74 bp, Artificial Sequence
  Description of Artificial Sequence: Synthetic oligonucleotide
gaaattaatacgactcactatagggatgaataatgagttgtctgataaaaacgttttagagctatgctgttttg

SEQ ID NO: 2753 - DNA, 74 bp, Artificial Sequence
  Description of Artificial Sequence: Synthetic oligonucleotide
gaaattaatacgactcactatagggatgaataactggttctgctagtgcaaggttttagagctatgctgttttg

SEQ ID NO: 2754 - DNA, 74 bp, Artificial Sequence
  Description of Artificial Sequence: Synthetic oligonucleotide
gaaattaatacgactcactatagggatgaataatggcattacccaggaagaggttttagagctatgctgttttg

SEQ ID NO: 2755 - DNA, 74 bp, Artificial Sequence
  Description of Artificial Sequence: Synthetic oligonucleotide
gaaattaatacgactcactatagggatgaatacagtgttgcttagtccatcagttttagagctatgctgttttg

SEQ ID NO: 2756 - DNA, 74 bp, Artificial Sequence
  Description of Artificial Sequence: Synthetic oligonucleotide
gaaattaatacgactcactatagggatgaatactatctaaatccggtggaaagttttagagctatgctgttttg

SEQ ID NO: 2757 - DNA, 74 bp, Artificial Sequence
  Description of Artificial Sequence: Synthetic oligonucleotide
gaaattaatacgactcactatagggatgaatatctgttgaaatagtaaagcagttttagagctatgctgttttg

SEQ ID NO: 2758 - DNA, 74 bp, Artificial Sequence
  Description of Artificial Sequence: Synthetic oligonucleotide
gaaattaatacgactcactatagggatgaatagagtaacaaatagaaacaacgttttagagctatgctgttttg

SEQ ID NO: 2759 - DNA, 74 bp, Artificial Sequence
  Description of Artificial Sequence: Synthetic oligonucleotide
gaaattaatacgactcactatagggatgaatagctcagagaaggcaatggccgttttagagctatgctgttttg

SEQ ID NO: 2760 - DNA, 74 bp, Artificial Sequence
  Description of Artificial Sequence: Synthetic oligonucleotide
gaaattaatacgactcactatagggatgaataccacttgaagaaagagctaagttttagagctatgctgttttg

SEQ ID NO: 2761 - DNA, 74 bp, Artificial Sequence
  Description of Artificial Sequence: Synthetic oligonucleotide
gaaattaatacgactcactatagggatgaataaaagggctaggtatcagagggttttagagctatgctgttttg

SEQ ID NO: 2762 - DNA, 74 bp, Artificial Sequence
  Description of Artificial Sequence: Synthetic oligonucleotide
gaaattaatacgactcactatagggatgaataggaccctgaggccactggcagttttagagctatgctgttttg

SEQ ID NO: 2763 - DNA, 74 bp, Artificial Sequence
  Description of Artificial Sequence: Synthetic oligonucleotide
gaaattaatacgactcactatagggatgaataaggcacataacagatgctcagttttagagctatgctgttttg

SEQ ID NO: 2764 - DNA, 74 bp, Artificial Sequence
  Description of Artificial Sequence: Synthetic oligonucleotide
gaaattaatacgactcactatagggatgaatactaagattttgagccaaaccgttttagagctatgctgttttg

SEQ ID NO: 2765 - DNA, 74 bp, Artificial Sequence
  Description of Artificial Sequence: Synthetic oligonucleotide
gaaattaatacgactcactatagggatgaataatgttcacatttcaatgcaagttttagagctatgctgttttg

SEQ ID NO: 2766 - DNA, 74 bp, Artificial Sequence
  Description of Artificial Sequence: Synthetic oligonucleotide
gaaattaatacgactcactatagggatgaatagagcagatgttggagggaaagttttagagctatgctgttttg

SEQ ID NO: 2767 - DNA, 74 bp, Artificial Sequence
  Description of Artificial Sequence: Synthetic oligonucleotide
gaaattaatacgactcactatagggatgaataagagcttttcaagtgaaaccgttttagagctatgctgttttg

SEQ ID NO: 2768 - DNA, 74 bp, Artificial Sequence
  Description of Artificial Sequence: Synthetic oligonucleotide
gaaattaatacgactcactatagggatgaatagcattagttagattctcaaagttttagagctatgctgttttg

SEQ ID NO: 2769 - DNA, 74 bp, Artificial Sequence
  Description of Artificial Sequence: Synthetic oligonucleotide
gaaattaatacgactcactatagggatgaatatttttccatagaaggggccggttttagagctatgctgttttg

SEQ ID NO: 2770 - DNA, 74 bp, Artificial Sequence
  Description of Artificial Sequence: Synthetic oligonucleotide
gaaattaatacgactcactatagggatgaatattgctagaattccatggaaagttttagagctatgctgttttg

SEQ ID NO: 2771 - DNA, 74 bp, Artificial Sequence
  Description of Artificial Sequence: Synthetic oligonucleotide
gaaattaatacgactcactatagggatgaatatttaaggtagatgttcgtcagttttagagctatgctgttttg

SEQ ID NO: 2772 - DNA, 74 bp, Artificial Sequence
  Description of Artificial Sequence: Synthetic oligonucleotide
gaaattaatacgactcactatagggatgaatatgtgtatccctggttaaagggttttagagctatgctgttttg

SEQ ID NO: 2773 - DNA, 74 bp, Artificial Sequence
  Description of Artificial Sequence: Synthetic oligonucleotide
gaaattaatacgactcactatagggatgaatagcacatgaatattttcaaaggttttagagctatgctgttttg

SEQ ID NO: 2774 - DNA, 74 bp, Artificial Sequence
  Description of Artificial Sequence: Synthetic oligonucleotide
gaaattaatacgactcactatagggatgaatagtgaattccacttattcccagttttagagctatgctgttttg

SEQ ID NO: 2775 - DNA, 74 bp, Artificial Sequence
  Description of Artificial Sequence: Synthetic oligonucleotide
gaaattaatacgactcactatagggatgaatatagttgaatatatgggctgggttttagagctatgctgttttg

SEQ ID NO: 2776 - DNA, 74 bp, Artificial Sequence
  Description of Artificial Sequence: Synthetic oligonucleotide
gaaattaatacgactcactatagggatgaataactactgggtatctaccaaagttttagagctatgctgttttg

SEQ ID NO: 2777 - DNA, 74 bp, Artificial Sequence
  Description of Artificial Sequence: Synthetic oligonucleotide
gaaattaatacgactcactatagggatgaatactagtttataaccactgtgagttttagagctatgctgttttg

SEQ ID NO: 2778 - DNA, 74 bp, Artificial Sequence
  Description of Artificial Sequence: Synthetic oligonucleotide
gaaattaatacgactcactatagggatgaatattagaaatgaactaatgaccgttttagagctatgctgttttg

SEQ ID NO: 2779 - DNA, 74 bp, Artificial Sequence
  Description of Artificial Sequence: Synthetic oligonucleotide
gaaattaatacgactcactatagggatgaatatgttactttattgcctctaagttttagagctatgctgttttg

SEQ ID NO: 2780 - DNA, 74 bp, Artificial Sequence
  Description of Artificial Sequence: Synthetic oligonucleotide
gaaattaatacgactcactatagggatgaatatcagaagcaagatttggaccgttttagagctatgctgttttg

SEQ ID NO: 2781 - DNA, 74 bp, Artificial Sequence
  Description of Artificial Sequence: Synthetic oligonucleotide
gaaattaatacgactcactatagggatgaataatatagtatttgagctgaaagttttagagctatgctgttttg

SEQ ID NO: 2782 - DNA, 74 bp, Artificial Sequence
  Description of Artificial Sequence: Synthetic oligonucleotide
gaaattaatacgactcactatagggatgaataaggagactccaggtccaagggttttagagctatgctgttttg

SEQ ID NO: 2783 - DNA, 74 bp, Artificial Sequence
  Description of Artificial Sequence: Synthetic oligonucleotide
gaaattaatacgactcactatagggatgaataattctgggtttcttgactaggttttagagctatgctgttttg

SEQ ID NO: 2784 - DNA, 74 bp, Artificial Sequence
  Description of Artificial Sequence: Synthetic oligonucleotide
gaaattaatacgactcactatagggatgaatattttggcagggagagagagcgttttagagctatgctgttttg

SEQ ID NO: 2785 - DNA, 74 bp, Artificial Sequence
  Description of Artificial Sequence: Synthetic oligonucleotide
gaaattaatacgactcactatagggatgaatagctgctttgtagcccactccgttttagagctatgctgttttg

SEQ ID NO: 2786 - DNA, 74 bp, Artificial Sequence
  Description of Artificial Sequence: Synthetic oligonucleotide
gaaattaatacgactcactatagggatgaatactataaacttaaaagccagcgttttagagctatgctgttttg

SEQ ID NO: 2787 - DNA, 74 bp, Artificial Sequence
  Description of Artificial Sequence: Synthetic oligonucleotide
gaaattaatacgactcactatagggatgaataaaaaatcgaatacaatgagagttttagagctatgctgttttg

SEQ ID NO: 2788 - DNA, 74 bp, Artificial Sequence
  Description of Artificial Sequence: Synthetic oligonucleotide
gaaattaatacgactcactatagggatgaataggaagaggaagagaacatgggttttagagctatgctgttttg

SEQ ID NO: 2789 - DNA, 74 bp, Artificial Sequence
  Description of Artificial Sequence: Synthetic oligonucleotide
gaaattaatacgactcactatagggatgaataagtaatttataaagaaaaaggttttagagctatgctgttttg

SEQ ID NO: 2790 - DNA, 74 bp, Artificial Sequence
  Description of Artificial Sequence: Synthetic oligonucleotide
gaaattaatacgactcactatagggatgaatagtacaattctcaaatgaaaggttttagagctatgctgttttg

SEQ ID NO: 2791 - DNA, 74 bp, Artificial Sequence
  Description of Artificial Sequence: Synthetic oligonucleotide
gaaattaatacgactcactatagggatgaatagtttgggttactgtctggacgttttagagctatgctgttttg

SEQ ID NO: 2792 - DNA, 74 bp, Artificial Sequence
  Description of Artificial Sequence: Synthetic oligonucleotide
gaaattaatacgactcactatagggatgaataaaatagatttcttgagccaggttttagagctatgctgttttg

SEQ ID NO: 2793 - DNA, 74 bp, Artificial Sequence
  Description of Artificial Sequence: Synthetic oligonucleotide
gaaattaatacgactcactatagggatgaatatttgtggcagccaactctaagttttagagctatgctgttttg

SEQ ID NO: 2794 - DNA, 74 bp, Artificial Sequence
  Description of Artificial Sequence: Synthetic oligonucleotide
gaaattaatacgactcactatagggatgaatagaagccaaaagataacagaagttttagagctatgctgttttg

SEQ ID NO: 2795 - DNA, 74 bp, Artificial Sequence
  Description of Artificial Sequence: Synthetic oligonucleotide
gaaattaatacgactcactatagggatgaatactagccaaggtcacaagagggttttagagctatgctgttttg

SEQ ID NO: 2796 - DNA, 74 bp, Artificial Sequence
  Description of Artificial Sequence: Synthetic oligonucleotide
gaaattaatacgactcactatagggatgaatattaggagtgttctcagaggagttttagagctatgctgttttg

SEQ ID NO: 2797 - DNA, 74 bp, Artificial Sequence
  Description of Artificial Sequence: Synthetic oligonucleotide
gaaattaatacgactcactatagggatgaatatcagctctctgtgggaggaagttttagagctatgctgttttg

SEQ ID NO: 2798 - DNA, 74 bp, Artificial Sequence
  Description of Artificial Sequence: Synthetic oligonucleotide
gaaattaatacgactcactatagggatgaatagagatacatcagctcactgagttttagagctatgctgttttg

SEQ ID NO: 2799 - DNA, 74 bp, Artificial Sequence
  Description of Artificial Sequence: Synthetic oligonucleotide
gaaattaatacgactcactatagggatgaatatgtcagggacaagtgggaacgttttagagctatgctgttttg

SEQ ID NO: 2800 - DNA, 74 bp, Artificial Sequence
  Description of Artificial Sequence: Synthetic oligonucleotide
gaaattaatacgactcactatagggatgaatagtatctatctaatggagccagttttagagctatgctgttttg

SEQ ID NO: 2801 - DNA, 74 bp, Artificial Sequence
  Description of Artificial Sequence: Synthetic oligonucleotide
gaaattaatacgactcactatagggatgaatattacctcagtgtttgtcagggttttagagctatgctgttttg

SEQ ID NO: 2802 - DNA, 74 bp, Artificial Sequence
  Description of Artificial Sequence: Synthetic oligonucleotide
gaaattaatacgactcactatagggatgaataatggagggacacgtatgccagttttagagctatgctgttttg

SEQ ID NO: 2803 - DNA, 74 bp, Artificial Sequence
  Description of Artificial Sequence: Synthetic oligonucleotide
gaaattaatacgactcactatagggatgaataaaaggcaaggggtgaaagaggttttagagctatgctgttttg

SEQ ID NO: 2804 - DNA, 74 bp, Artificial Sequence
  Description of Artificial Sequence: Synthetic oligonucleotide
gaaattaatacgactcactatagggatgaatatatccaagagaagggggagagttttagagctatgctgttttg

SEQ ID NO: 2805 - DNA, 74 bp, Artificial Sequence
  Description of Artificial Sequence: Synthetic oligonucleotide
gaaattaatacgactcactatagggatgaataaggccgatgatgtgttataagttttagagctatgctgttttg

SEQ ID NO: 2806 - DNA, 74 bp, Artificial Sequence
  Description of Artificial Sequence: Synthetic oligonucleotide
gaaattaatacgactcactatagggatgaatatctaagtgctgtgcagcaccgttttagagctatgctgttttg

SEQ ID NO: 2807 - DNA, 74 bp, Artificial Sequence
  Description of Artificial Sequence: Synthetic oligonucleotide
gaaattaatacgactcactatagggatgaatataatgatatggcctaccacagttttagagctatgctgttttg

SEQ ID NO: 2808 - DNA, 74 bp, Artificial Sequence
  Description of Artificial Sequence: Synthetic oligonucleotide
gaaattaatacgactcactatagggatgaatatagcagaatgattaaaaacagttttagagctatgctgttttg

SEQ ID NO: 2809 - DNA, 74 bp, Artificial Sequence
  Description of Artificial Sequence: Synthetic oligonucleotide
gaaattaatacgactcactatagggatgaataccaattgattcatagaatcagttttagagctatgctgttttg

SEQ ID NO: 2810 - DNA, 74 bp, Artificial Sequence
  Description of Artificial Sequence: Synthetic oligonucleotide
gaaattaatacgactcactatagggatgaataaatcttgtatgaaaccaccagttttagagctatgctgttttg

SEQ ID NO: 2811 - DNA, 74 bp, Artificial Sequence
  Description of Artificial Sequence: Synthetic oligonucleotide
gaaattaatacgactcactatagggatgaatacatgctcttctacttactaggttttagagctatgctgttttg

SEQ ID NO: 2812 - DNA, 74 bp, Artificial Sequence
  Description of Artificial Sequence: Synthetic oligonucleotide
gaaattaatacgactcactatagggatgaataaaggcagaagtacatgcacagttttagagctatgctgttttg

SEQ ID NO: 2813 - DNA, 74 bp, Artificial Sequence
  Description of Artificial Sequence: Synthetic oligonucleotide
gaaattaatacgactcactatagggatgaatatggaccatacaaaggcacaggttttagagctatgctgttttg

SEQ ID NO: 2814 - DNA, 74 bp, Artificial Sequence
  Description of Artificial Sequence: Synthetic oligonucleotide
gaaattaatacgactcactatagggatgaatatcaggaaaatgtcacagaaggttttagagctatgctgttttg

SEQ ID NO: 2815 - DNA, 74 bp, Artificial Sequence
  Description of Artificial Sequence: Synthetic oligonucleotide
gaaattaatacgactcactatagggatgaatagagagggatggaccttatgagttttagagctatgctgttttg

SEQ ID NO: 2816 - DNA, 74 bp, Artificial Sequence
  Description of Artificial Sequence: Synthetic oligonucleotide
gaaattaatacgactcactatagggatgaataatgcaaaagatttccaaggagttttagagctatgctgttttg

SEQ ID NO: 2817 - DNA, 74 bp, Artificial Sequence
  Description of Artificial Sequence: Synthetic oligonucleotide
gaaattaatacgactcactatagggatgaataataacaggcttaatcaaggagttttagagctatgctgttttg

SEQ ID NO: 2818 - DNA, 74 bp, Artificial Sequence
  Description of Artificial Sequence: Synthetic oligonucleotide
gaaattaatacgactcactatagggatgaataagagtaaatgagcactgaaggttttagagctatgctgttttg

SEQ ID NO: 2819 - DNA, 74 bp, Artificial Sequence
  Description of Artificial Sequence: Synthetic oligonucleotide
gaaattaatacgactcactatagggatgaatatggatgttaatggtttccaggttttagagctatgctgttttg

SEQ ID NO: 2820 - DNA, 74 bp, Artificial Sequence
  Description of Artificial Sequence: Synthetic oligonucleotide
gaaattaatacgactcactatagggatgaataagaaggcacttccctggagagttttagagctatgctgttttg

SEQ ID NO: 2821 - DNA, 74 bp, Artificial Sequence
  Description of Artificial Sequence: Synthetic oligonucleotide
gaaattaatacgactcactatagggatgaataattgttatacagacccacacgttttagagctatgctgttttg

SEQ ID NO: 2822 - DNA, 74 bp, Artificial Sequence
  Description of Artificial Sequence: Synthetic oligonucleotide
gaaattaatacgactcactatagggatgaataattatagaagggttttccccgttttagagctatgctgttttg

SEQ ID NO: 2823 - DNA, 74 bp, Artificial Sequence
  Description of Artificial Sequence: Synthetic oligonucleotide
gaaattaatacgactcactatagggatgaatagagtagagtccaggcagtgcgttttagagctatgctgttttg

SEQ ID NO: 2824 - DNA, 74 bp, Artificial Sequence
  Description of Artificial Sequence: Synthetic oligonucleotide
gaaattaatacgactcactatagggatgaatagagactttttagggaaaaaagttttagagctatgctgttttg

SEQ ID NO: 2825 - DNA, 74 bp, Artificial Sequence
  Description of Artificial Sequence: Synthetic oligonucleotide
gaaattaatacgactcactatagggatgaatacatctaacgtcaagtgaagcgttttagagctatgctgttttg

SEQ ID NO: 2826 - DNA, 74 bp, Artificial Sequence
  Description of Artificial Sequence: Synthetic oligonucleotide
gaaattaatacgactcactatagggatgaatatagacaatacttaaaggaacgttttagagctatgctgttttg

SEQ ID NO: 2827 - DNA, 74 bp, Artificial Sequence
  Description of Artificial Sequence: Synthetic oligonucleotide
gaaattaatacgactcactatagggatgaatatttctgccatggcctaaggcgttttagagctatgctgttttg

SEQ ID NO: 2828 - DNA, 74 bp, Artificial Sequence
  Description of Artificial Sequence: Synthetic oligonucleotide
gaaattaatacgactcactatagggatgaatagatccaatgtgggtccatgggttttagagctatgctgttttg

SEQ ID NO: 2829 - DNA, 74 bp, Artificial Sequence
  Description of Artificial Sequence: Synthetic oligonucleotide
gaaattaatacgactcactatagggatgaatacgggaaaacagggtctggaggttttagagctatgctgttttg

SEQ ID NO: 2830 - DNA, 74 bp, Artificial Sequence
  Description of Artificial Sequence: Synthetic oligonucleotide
gaaattaatacgactcactatagggatgaatacagctcatacaggaaagcgcgttttagagctatgctgttttg

SEQ ID NO: 2831 - DNA, 74 bp, Artificial Sequence
  Description of Artificial Sequence: Synthetic oligonucleotide
gaaattaatacgactcactatagggatgaataacagtgtaaacaaagccaccgttttagagctatgctgttttg

SEQ ID NO: 2832 - DNA, 74 bp, Artificial Sequence
  Description of Artificial Sequence: Synthetic oligonucleotide
gaaattaatacgactcactatagggatgaatacctctggtgcctggctcggggttttagagctatgctgttttg

SEQ ID NO: 2833 - DNA, 74 bp, Artificial Sequence
  Description of Artificial Sequence: Synthetic oligonucleotide
gaaattaatacgactcactatagggatgaataacttttggagaggatgaggagttttagagctatgctgttttg

SEQ ID NO: 2834 - DNA, 74 bp, Artificial Sequence
  Description of Artificial Sequence: Synthetic oligonucleotide
gaaattaatacgactcactatagggatgaatagctaattagccttttcaaaagttttagagctatgctgttttg

SEQ ID NO: 2835 - DNA, 74 bp, Artificial Sequence
  Description of Artificial Sequence: Synthetic oligonucleotide
gaaattaatacgactcactatagggatgaataactctcacatcgtctaacacgttttagagctatgctgttttg

SEQ ID NO: 2836 - DNA, 74 bp, Artificial Sequence
  Description of Artificial Sequence: Synthetic oligonucleotide
gaaattaatacgactcactatagggatgaataattttaacatatattgctcagttttagagctatgctgttttg

SEQ ID NO: 2837 - DNA, 74 bp, Artificial Sequence
  Description of Artificial Sequence: Synthetic oligonucleotide
gaaattaatacgactcactatagggatgaataaaaatagatgggcagtgccagttttagagctatgctgttttg

SEQ ID NO: 2838 - DNA, 74 bp, Artificial Sequence
  Description of Artificial Sequence: Synthetic oligonucleotide
gaaattaatacgactcactatagggatgaatattgaaaagaacattgcctgagttttagagctatgctgttttg

SEQ ID NO: 2839 - DNA, 74 bp, Artificial Sequence
  Description of Artificial Sequence: Synthetic oligonucleotide
gaaattaatacgactcactatagggatgaatatcatgatgacagcaatagaagttttagagctatgctgttttg

SEQ ID NO: 2840 - DNA, 74 bp, Artificial Sequence
  Description of Artificial Sequence: Synthetic oligonucleotide
gaaattaatacgactcactatagggatgaataaaacagggcaagaaccagcagttttagagctatgctgttttg

SEQ ID NO: 2841 - DNA, 74 bp, Artificial Sequence
  Description of Artificial Sequence: Synthetic oligonucleotide
gaaattaatacgactcactatagggatgaataaagtagttaaaattctagcagttttagagctatgctgttttg

SEQ ID NO: 2842 - DNA, 74 bp, Artificial Sequence
  Description of Artificial Sequence: Synthetic oligonucleotide
gaaattaatacgactcactatagggatgaataataccacttttgtcctacaggttttagagctatgctgttttg

SEQ ID NO: 2843 - DNA, 74 bp, Artificial Sequence
  Description of Artificial Sequence: Synthetic oligonucleotide
gaaattaatacgactcactatagggatgaatagctgcttgagagaaacagaagttttagagctatgctgttttg

SEQ ID NO: 2844 - DNA, 74 bp, Artificial Sequence
  Description of Artificial Sequence: Synthetic oligonucleotide
gaaattaatacgactcactatagggatgaatatttaatttctcaccttcccggttttagagctatgctgttttg

SEQ ID NO: 2845 - DNA, 74 bp, Artificial Sequence
  Description of Artificial Sequence: Synthetic oligonucleotide
gaaattaatacgactcactatagggatgaatagagagaatttcactgactccgttttagagctatgctgttttg

SEQ ID NO: 2846 - DNA, 74 bp, Artificial Sequence
  Description of Artificial Sequence: Synthetic oligonucleotide
gaaattaatacgactcactatagggatgaatagaggctaaggagtgataaaagttttagagctatgctgttttg

SEQ ID NO: 2847 - DNA, 74 bp, Artificial Sequence
  Description of Artificial Sequence: Synthetic oligonucleotide
gaaattaatacgactcactatagggatgaatatgttcaaatttccagtgagagttttagagctatgctgttttg

SEQ ID NO: 2848 - DNA, 74 bp, Artificial Sequence
  Description of Artificial Sequence: Synthetic oligonucleotide
gaaattaatacgactcactatagggatgaataacagaaaatggcccctgaaagttttagagctatgctgttttg

SEQ ID NO: 2849 - DNA, 74 bp, Artificial Sequence
  Description of Artificial Sequence: Synthetic oligonucleotide
gaaattaatacgactcactatagggatgaataccagtgctgctgtaggctaggttttagagctatgctgttttg

SEQ ID NO: 2850 - DNA, 74 bp, Artificial Sequence
  Description of Artificial Sequence: Synthetic oligonucleotide
gaaattaatacgactcactatagggatgaatagaaatcctacttttctgccagttttagagctatgctgttttg

SEQ ID NO: 2851 - DNA, 74 bp, Artificial Sequence
  Description of Artificial Sequence: Synthetic oligonucleotide
gaaattaatacgactcactatagggatgaataggtgacacccagtactgtgcgttttagagctatgctgttttg

SEQ ID NO: 2852 - DNA, 74 bp, Artificial Sequence
  Description of Artificial Sequence: Synthetic oligonucleotide
gaaattaatacgactcactatagggatgaatactgtaggaaacacacaggccgttttagagctatgctgttttg

SEQ ID NO: 2853 - DNA, 74 bp, Artificial Sequence
  Description of Artificial Sequence: Synthetic oligonucleotide
gaaattaatacgactcactatagggatgaataccgtttttgactctagacccgttttagagctatgctgttttg

SEQ ID NO: 2854 - DNA, 74 bp, Artificial Sequence
  Description of Artificial Sequence: Synthetic oligonucleotide
gaaattaatacgactcactatagggatgaatatggcacccctctgcacctccgttttagagctatgctgttttg

SEQ ID NO: 2855 - DNA, 74 bp, Artificial Sequence
  Description of Artificial Sequence: Synthetic oligonucleotide
gaaattaatacgactcactatagggatgaataggtagtagccaggcaggcaggttttagagctatgctgttttg

SEQ ID NO: 2856 - DNA, 74 bp, Artificial Sequence
  Description of Artificial Sequence: Synthetic oligonucleotide
gaaattaatacgactcactatagggatgaatagaggaaaggagacggaagaggttttagagctatgctgttttg

SEQ ID NO: 2857 - DNA, 74 bp, Artificial Sequence
  Description of Artificial Sequence: Synthetic oligonucleotide
gaaattaatacgactcactatagggatgaataagtaaacattggcagtagccgttttagagctatgctgttttg

SEQ ID NO: 2858 - DNA, 74 bp, Artificial Sequence
  Description of Artificial Sequence: Synthetic oligonucleotide
gaaattaatacgactcactatagggatgaataagattctagaccttggctccgttttagagctatgctgttttg

SEQ ID NO: 2859 - DNA, 74 bp, Artificial Sequence
  Description of Artificial Sequence: Synthetic oligonucleotide
gaaattaatacgactcactatagggatgaatacatagaataatggaacagaagttttagagctatgctgttttg

SEQ ID NO: 2860 - DNA, 74 bp, Artificial Sequence
  Description of Artificial Sequence: Synthetic oligonucleotide
gaaattaatacgactcactatagggatgaataaaaaacagcccaaatggccagttttagagctatgctgttttg

SEQ ID NO: 2861 - DNA, 74 bp, Artificial Sequence
  Description of Artificial Sequence: Synthetic oligonucleotide
gaaattaatacgactcactatagggatgaatagtagtcatcctaaggagagcgttttagagctatgctgttttg

SEQ ID NO: 2862 - DNA, 74 bp, Artificial Sequence
  Description of Artificial Sequence: Synthetic oligonucleotide
gaaattaatacgactcactatagggatgaatactgaacattcccagtaggaggttttagagctatgctgttttg

SEQ ID NO: 2863 - DNA, 74 bp, Artificial Sequence
  Description of Artificial Sequence: Synthetic oligonucleotide
gaaattaatacgactcactatagggatgaataggagaggcttcctcaccacagttttagagctatgctgttttg

SEQ ID NO: 2864 - DNA, 74 bp, Artificial Sequence
  Description of Artificial Sequence: Synthetic oligonucleotide
gaaattaatacgactcactatagggatgaatacaaggaaaaaacgtggcccagttttagagctatgctgttttg

SEQ ID NO: 2865 - DNA, 74 bp, Artificial Sequence
  Description of Artificial Sequence: Synthetic oligonucleotide
gaaattaatacgactcactatagggatgaataagatataggtaagtctgacagttttagagctatgctgttttg

SEQ ID NO: 2866 - DNA, 74 bp, Artificial Sequence
  Description of Artificial Sequence: Synthetic oligonucleotide
gaaattaatacgactcactatagggatgaataggagatacacagtagtgaaagttttagagctatgctgttttg

SEQ ID NO: 2867 - DNA, 74 bp, Artificial Sequence
  Description of Artificial Sequence: Synthetic oligonucleotide
gaaattaatacgactcactatagggatgaatagaatggttgcagtaatgagggttttagagctatgctgttttg

SEQ ID NO: 2868 - DNA, 74 bp, Artificial Sequence
  Description of Artificial Sequence: Synthetic oligonucleotide
gaaattaatacgactcactatagggatgaatagttttccaagttggacataagttttagagctatgctgttttg

SEQ ID NO: 2869 - DNA, 74 bp, Artificial Sequence
  Description of Artificial Sequence: Synthetic oligonucleotide
gaaattaatacgactcactatagggatgaatatgggagtttacaataaacaagttttagagctatgctgttttg

SEQ ID NO: 2870 - DNA, 74 bp, Artificial Sequence
  Description of Artificial Sequence: Synthetic oligonucleotide
gaaattaatacgactcactatagggatgaataaagccagaaaattaaccaacgttttagagctatgctgttttg

SEQ ID NO: 2871 - DNA, 74 bp, Artificial Sequence
  Description of Artificial Sequence: Synthetic oligonucleotide
gaaattaatacgactcactatagggatgaataaggccagaagatgagaacaagttttagagctatgctgttttg

SEQ ID NO: 2872 - DNA, 74 bp, Artificial Sequence
  Description of Artificial Sequence: Synthetic oligonucleotide
gaaattaatacgactcactatagggatgaatatagggaagaaggagtagagagttttagagctatgctgttttg

SEQ ID NO: 2873 - DNA, 74 bp, Artificial Sequence
  Description of Artificial Sequence: Synthetic oligonucleotide
gaaattaatacgactcactatagggatgaataggatttgttatagaaaacaggttttagagctatgctgttttg

SEQ ID NO: 2874 - DNA, 74 bp, Artificial Sequence
  Description of Artificial Sequence: Synthetic oligonucleotide
gaaattaatacgactcactatagggatgaatattatattgtagataataaaggttttagagctatgctgttttg

SEQ ID NO: 2875 - DNA, 74 bp, Artificial Sequence
  Description of Artificial Sequence: Synthetic oligonucleotide
gaaattaatacgactcactatagggatgaataaaattaaatgccaggaatcagttttagagctatgctgttttg

SEQ ID NO: 2876 - DNA, 74 bp, Artificial Sequence
  Description of Artificial Sequence: Synthetic oligonucleotide
gaaattaatacgactcactatagggatgaataatagcatgagcaaatgccaagttttagagctatgctgttttg

SEQ ID NO: 2877 - DNA, 74 bp, Artificial Sequence
  Description of Artificial Sequence: Synthetic oligonucleotide
gaaattaatacgactcactatagggatgaatacaagcatgttgatcaagaacgttttagagctatgctgttttg

SEQ ID NO: 2878 - DNA, 74 bp, Artificial Sequence
  Description of Artificial Sequence: Synthetic oligonucleotide
gaaattaatacgactcactatagggatgaataactaagcttagtgaaggtcagttttagagctatgctgttttg

SEQ ID NO: 2879 - DNA, 74 bp, Artificial Sequence
  Description of Artificial Sequence: Synthetic oligonucleotide
gaaattaatacgactcactatagggatgaatagctttgtttagcctacacaagttttagagctatgctgttttg

SEQ ID NO: 2880 - DNA, 74 bp, Artificial Sequence
  Description of Artificial Sequence: Synthetic oligonucleotide
gaaattaatacgactcactatagggatgaataggacttatagagcttcaaaggttttagagctatgctgttttg

SEQ ID NO: 2881 - DNA, 74 bp, Artificial Sequence
  Description of Artificial Sequence: Synthetic oligonucleotide
gaaattaatacgactcactatagggatgaatactttactacaaccatgataagttttagagctatgctgttttg

SEQ ID NO: 2882 - DNA, 74 bp, Artificial Sequence
  Description of Artificial Sequence: Synthetic oligonucleotide
gaaattaatacgactcactatagggatgaatagaaatagttttgagctcgccgttttagagctatgctgttttg

SEQ ID NO: 2883 - DNA, 74 bp, Artificial Sequence
  Description of Artificial Sequence: Synthetic oligonucleotide
gaaattaatacgactcactatagggatgaatagagggaagagtatggaatcagttttagagctatgctgttttg

SEQ ID NO: 2884 - DNA, 74 bp, Artificial Sequence
  Description of Artificial Sequence: Synthetic oligonucleotide
gaaattaatacgactcactatagggatgaatacctgcccaggagaaccctgcgttttagagctatgctgttttg

SEQ ID NO: 2885 - DNA, 74 bp, Artificial Sequence
  Description of Artificial Sequence: Synthetic oligonucleotide
gaaattaatacgactcactatagggatgaatacatgcataccactaagaaaggttttagagctatgctgttttg

SEQ ID NO: 2886 - DNA, 74 bp, Artificial Sequence
  Description of Artificial Sequence: Synthetic oligonucleotide
gaaattaatacgactcactatagggatgaatacggaacccatacttttcccagttttagagctatgctgttttg

SEQ ID NO: 2887 - DNA, 74 bp, Artificial Sequence
  Description of Artificial Sequence: Synthetic oligonucleotide
gaaattaatacgactcactatagggatgaatacaactcccagctacctaaaagttttagagctatgctgttttg

SEQ ID NO: 2888 - DNA, 74 bp, Artificial Sequence
  Description of Artificial Sequence: Synthetic oligonucleotide
gaaattaatacgactcactatagggatgaatatttgtaggctttcagtatacgttttagagctatgctgttttg

SEQ ID NO: 2889 - DNA, 74 bp, Artificial Sequence
  Description of Artificial Sequence: Synthetic oligonucleotide
gaaattaatacgactcactatagggatgaatagtggggtggagccctaaccagttttagagctatgctgttttg

SEQ ID NO: 2890 - DNA, 74 bp, Artificial Sequence
  Description of Artificial Sequence: Synthetic oligonucleotide
gaaattaatacgactcactatagggatgaatacctgaatctccagttgcagagttttagagctatgctgttttg

SEQ ID NO: 2891 - DNA, 74 bp, Artificial Sequence
  Description of Artificial Sequence: Synthetic oligonucleotide
gaaattaatacgactcactatagggatgaatatagtcaggtaatagttacaagttttagagctatgctgttttg

SEQ ID NO: 2892 - DNA, 74 bp, Artificial Sequence
  Description of Artificial Sequence: Synthetic oligonucleotide
gaaattaatacgactcactatagggatgaataaaaagggaaatacccagtccgttttagagctatgctgttttg

SEQ ID NO: 2893 - DNA, 74 bp, Artificial Sequence
  Description of Artificial Sequence: Synthetic oligonucleotide
gaaattaatacgactcactatagggatgaatagaggagagcaaagtgtaaaggttttagagctatgctgttttg

SEQ ID NO: 2894 - DNA, 74 bp, Artificial Sequence
  Description of Artificial Sequence: Synthetic oligonucleotide
gaaattaatacgactcactatagggatgaataacatcagttggtatggctaagttttagagctatgctgttttg

SEQ ID NO: 2895 - DNA, 74 bp, Artificial Sequence
  Description of Artificial Sequence: Synthetic oligonucleotide
gaaattaatacgactcactatagggatgaatagaagggcagtctaaggcacagttttagagctatgctgttttg

SEQ ID NO: 2896 - DNA, 74 bp, Artificial Sequence
  Description of Artificial Sequence: Synthetic oligonucleotide
gaaattaatacgactcactatagggatgaatactgcaccagagctagccagagttttagagctatgctgttttg

SEQ ID NO: 2897 - DNA, 74 bp, Artificial Sequence
  Description of Artificial Sequence: Synthetic oligonucleotide
gaaattaatacgactcactatagggatgaatacagaggggaattgcctatccgttttagagctatgctgttttg

SEQ ID NO: 2898 - DNA, 74 bp, Artificial Sequence
  Description of Artificial Sequence: Synthetic oligonucleotide
gaaattaatacgactcactatagggatgaataggagggaaagtgcactgacagttttagagctatgctgttttg

SEQ ID NO: 2899 - DNA, 74 bp, Artificial Sequence
  Description of Artificial Sequence: Synthetic oligonucleotide
gaaattaatacgactcactatagggatgaatacagagagcggcggggcagcagttttagagctatgctgttttg

SEQ ID NO: 2900 - DNA, 74 bp, Artificial Sequence
  Description of Artificial Sequence: Synthetic oligonucleotide
gaaattaatacgactcactatagggatgaatagcaaatcctatatctaataagttttagagctatgctgttttg

SEQ ID NO: 2901 - DNA, 74 bp, Artificial Sequence
  Description of Artificial Sequence: Synthetic oligonucleotide
gaaattaatacgactcactatagggatgaatacaaaatggctaatgacaaaagttttagagctatgctgttttg

SEQ ID NO: 2902 - DNA, 74 bp, Artificial Sequence
  Description of Artificial Sequence: Synthetic oligonucleotide
gaaattaatacgactcactatagggatgaatactgggcagcgcctcccgaccgttttagagctatgctgttttg

SEQ ID NO: 2903 - DNA, 74 bp, Artificial Sequence
  Description of Artificial Sequence: Synthetic oligonucleotide
gaaattaatacgactcactatagggatgaatactgttgccctcaggatctgggttttagagctatgctgttttg

SEQ ID NO: 2904 - DNA, 74 bp, Artificial Sequence
  Description of Artificial Sequence: Synthetic oligonucleotide
gaaattaatacgactcactatagggatgaatacaggataaggcccaccggccgttttagagctatgctgttttg

SEQ ID NO: 2905 - DNA, 74 bp, Artificial Sequence
  Description of Artificial Sequence: Synthetic oligonucleotide
gaaattaatacgactcactatagggatgaatagaggaggctagcatgcccccgttttagagctatgctgttttg

SEQ ID NO: 2906 - DNA, 74 bp, Artificial Sequence
  Description of Artificial Sequence: Synthetic oligonucleotide
gaaattaatacgactcactatagggatgaataggtctccagacccgcacagagttttagagctatgctgttttg

SEQ ID NO: 2907 - DNA, 74 bp, Artificial Sequence
  Description of Artificial Sequence: Synthetic oligonucleotide
gaaattaatacgactcactatagggatgaatatgggacccacactactgccagttttagagctatgctgttttg

SEQ ID NO: 2908 - DNA, 74 bp, Artificial Sequence
  Description of Artificial Sequence: Synthetic oligonucleotide
gaaattaatacgactcactatagggatgaatatggaaaacaaatatccacacgttttagagctatgctgttttg

SEQ ID NO: 2909 - DNA, 74 bp, Artificial Sequence
  Description of Artificial Sequence: Synthetic oligonucleotide
gaaattaatacgactcactatagggatgaatagcaaactgattctgagaaaagttttagagctatgctgttttg

SEQ ID NO: 2910 - DNA, 74 bp, Artificial Sequence
  Description of Artificial Sequence: Synthetic oligonucleotide
gaaattaatacgactcactatagggatgaataaggttttatctcttttaaaagttttagagctatgctgttttg

SEQ ID NO: 2911 - DNA, 74 bp, Artificial Sequence
  Description of Artificial Sequence: Synthetic oligonucleotide
gaaattaatacgactcactatagggatgaataacaaggatcaggagacaggagttttagagctatgctgttttg

SEQ ID NO: 2912 - DNA, 74 bp, Artificial Sequence
  Description of Artificial Sequence: Synthetic oligonucleotide
gaaattaatacgactcactatagggatgaatatagggcttgctttagcgaaggttttagagctatgctgttttg

SEQ ID NO: 2913 - DNA, 74 bp, Artificial Sequence
  Description of Artificial Sequence: Synthetic oligonucleotide
gaaattaatacgactcactatagggatgaatagaggagcaacggatccagcagttttagagctatgctgttttg

SEQ ID NO: 2914 - DNA, 74 bp, Artificial Sequence
  Description of Artificial Sequence: Synthetic oligonucleotide
gaaattaatacgactcactatagggatgaatagttctcctctctctcaggaagttttagagctatgctgttttg

SEQ ID NO: 2915 - DNA, 74 bp, Artificial Sequence
  Description of Artificial Sequence: Synthetic oligonucleotide
gaaattaatacgactcactatagggatgaatagaatgtgggatacagcataagttttagagctatgctgttttg

SEQ ID NO: 2916 - DNA, 74 bp, Artificial Sequence
  Description of Artificial Sequence: Synthetic oligonucleotide
gaaattaatacgactcactatagggatgaatagcaaagggctgccacaagaggttttagagctatgctgttttg

SEQ ID NO: 2917 - DNA, 74 bp, Artificial Sequence
  Description of Artificial Sequence: Synthetic oligonucleotide
gaaattaatacgactcactatagggatgaatagctgtccctttggaggatgcgttttagagctatgctgttttg

SEQ ID NO: 2918 - DNA, 74 bp, Artificial Sequence
  Description of Artificial Sequence: Synthetic oligonucleotide
gaaattaatacgactcactatagggatgaatacctggacattttggagatcagttttagagctatgctgttttg

SEQ ID NO: 2919 - DNA, 74 bp, Artificial Sequence
  Description of Artificial Sequence: Synthetic oligonucleotide
gaaattaatacgactcactatagggatgaataccatctcggcgacactgggagttttagagctatgctgttttg

SEQ ID NO: 2920 - DNA, 74 bp, Artificial Sequence
  Description of Artificial Sequence: Synthetic oligonucleotide
gaaattaatacgactcactatagggatgaatagaaaagggactagagaaaaagttttagagctatgctgttttg

SEQ ID NO: 2921 - DNA, 74 bp, Artificial Sequence
  Description of Artificial Sequence: Synthetic oligonucleotide
gaaattaatacgactcactatagggatgaatagcttgacacatctctagtgcgttttagagctatgctgttttg

SEQ ID NO: 2922 - DNA, 74 bp, Artificial Sequence
  Description of Artificial Sequence: Synthetic oligonucleotide
gaaattaatacgactcactatagggatgaatagaaatggttctatcttccaagttttagagctatgctgttttg

SEQ ID NO: 2923 - DNA, 74 bp, Artificial Sequence
  Description of Artificial Sequence: Synthetic oligonucleotide
gaaattaatacgactcactatagggatgaatagtgaacatacagggttggacgttttagagctatgctgttttg

SEQ ID NO: 2924 - DNA, 74 bp, Artificial Sequence
  Description of Artificial Sequence: Synthetic oligonucleotide
gaaattaatacgactcactatagggatgaataagggttgaaattctctgtgcgttttagagctatgctgttttg

SEQ ID NO: 2925 - DNA, 74 bp, Artificial Sequence
  Description of Artificial Sequence: Synthetic oligonucleotide
gaaattaatacgactcactatagggatgaatatcacctacagcccacaagcagttttagagctatgctgttttg

SEQ ID NO: 2926 - DNA, 74 bp, Artificial Sequence
  Description of Artificial Sequence: Synthetic oligonucleotide
gaaattaatacgactcactatagggatgaatagtgcaagagtacaccactaggttttagagctatgctgttttg

SEQ ID NO: 2927 - DNA, 74 bp, Artificial Sequence
  Description of Artificial Sequence: Synthetic oligonucleotide
gaaattaatacgactcactatagggatgaatatagtgtcaaccttgggagaagttttagagctatgctgttttg

SEQ ID NO: 2928 - DNA, 74 bp, Artificial Sequence
  Description of Artificial Sequence: Synthetic oligonucleotide
gaaattaatacgactcactatagggatgaatataaggaactgaggaaagcaagttttagagctatgctgttttg

SEQ ID NO: 2929 - DNA, 74 bp, Artificial Sequence
  Description of Artificial Sequence: Synthetic oligonucleotide
gaaattaatacgactcactatagggatgaatacttgtgactaaaatccagacgttttagagctatgctgttttg

SEQ ID NO: 2930 - DNA, 74 bp, Artificial Sequence
  Description of Artificial Sequence: Synthetic oligonucleotide
gaaattaatacgactcactatagggatgaatatgggtaatttatagagacaggttttagagctatgctgttttg

SEQ ID NO: 2931 - DNA, 74 bp, Artificial Sequence
  Description of Artificial Sequence: Synthetic oligonucleotide
gaaattaatacgactcactatagggatgaatattaaagaagtagtgagaggagttttagagctatgctgttttg

SEQ ID NO: 2932 - DNA, 74 bp, Artificial Sequence
  Description of Artificial Sequence: Synthetic oligonucleotide
gaaattaatacgactcactatagggatgaatattgaggatgggtaaagaacagttttagagctatgctgttttg

SEQ ID NO: 2933 - DNA, 74 bp, Artificial Sequence
  Description of Artificial Sequence: Synthetic oligonucleotide
gaaattaatacgactcactatagggatgaataagatgtcaatctgtggcagggttttagagctatgctgttttg

SEQ ID NO: 2934 - DNA, 74 bp, Artificial Sequence
  Description of Artificial Sequence: Synthetic oligonucleotide
gaaattaatacgactcactatagggatgaataagtcattcccttcaaggcaggttttagagctatgctgttttg

SEQ ID NO: 2935 - DNA, 74 bp, Artificial Sequence
  Description of Artificial Sequence: Synthetic oligonucleotide
gaaattaatacgactcactatagggatgaatattaaccacagccaccacagcgttttagagctatgctgttttg

SEQ ID NO: 2936 - DNA, 74 bp, Artificial Sequence
  Description of Artificial Sequence: Synthetic oligonucleotide
gaaattaatacgactcactatagggatgaataagaagaggggaagaagcaacgttttagagctatgctgttttg

SEQ ID NO: 2937 - DNA, 74 bp, Artificial Sequence
  Description of Artificial Sequence: Synthetic oligonucleotide
gaaattaatacgactcactatagggatgaatatgttgaggaaaatagagtaggttttagagctatgctgttttg

SEQ ID NO: 2938 - DNA, 74 bp, Artificial Sequence
  Description of Artificial Sequence: Synthetic oligonucleotide
gaaattaatacgactcactatagggatgaatactgtgaagtcaaagatcaaggttttagagctatgctgttttg

SEQ ID NO: 2939 - DNA, 74 bp, Artificial Sequence
  Description of Artificial Sequence: Synthetic oligonucleotide
gaaattaatacgactcactatagggatgaatatcagtacagaaggcacctccgttttagagctatgctgttttg

SEQ ID NO: 2940 - DNA, 74 bp, Artificial Sequence
  Description of Artificial Sequence: Synthetic oligonucleotide
gaaattaatacgactcactatagggatgaataatatccccgctgggcacccagttttagagctatgctgttttg

SEQ ID NO: 2941 - DNA, 74 bp, Artificial Sequence
  Description of Artificial Sequence: Synthetic oligonucleotide
gaaattaatacgactcactatagggatgaataagtgaggagagggcatgggcgttttagagctatgctgttttg

SEQ ID NO: 2942 - DNA, 74 bp, Artificial Sequence
  Description of Artificial Sequence: Synthetic oligonucleotide
gaaattaatacgactcactatagggatgaatactgacaaggaaggttaagcggttttagagctatgctgttttg

SEQ ID NO: 2943 - DNA, 74 bp, Artificial Sequence
  Description of Artificial Sequence: Synthetic oligonucleotide
gaaattaatacgactcactatagggatgaatagtatgctattgtcagtcaacgttttagagctatgctgttttg

SEQ ID NO: 2944 - DNA, 74 bp, Artificial Sequence
  Description of Artificial Sequence: Synthetic oligonucleotide
gaaattaatacgactcactatagggatgaatatcattcttgcatacaagcgagttttagagctatgctgttttg

SEQ ID NO: 2945 - DNA, 74 bp, Artificial Sequence
  Description of Artificial Sequence: Synthetic oligonucleotide
gaaattaatacgactcactatagggatgaataacatacttttaatgctaccagttttagagctatgctgttttg

SEQ ID NO: 2946 - DNA, 74 bp, Artificial Sequence
  Description of Artificial Sequence: Synthetic oligonucleotide
gaaattaatacgactcactatagggatgaatagctatgagatgtcctaggaagttttagagctatgctgttttg

SEQ ID NO: 2947 - DNA, 74 bp, Artificial Sequence
  Description of Artificial Sequence: Synthetic oligonucleotide
gaaattaatacgactcactatagggatgaatatggcttaactcctgctacccgttttagagctatgctgttttg

SEQ ID NO: 2948 - DNA, 74 bp, Artificial Sequence
  Description of Artificial Sequence: Synthetic oligonucleotide
gaaattaatacgactcactatagggatgaatactaaatgttccgggagctgagttttagagctatgctgttttg

SEQ ID NO: 2949 - DNA, 74 bp, Artificial Sequence
  Description of Artificial Sequence: Synthetic oligonucleotide
gaaattaatacgactcactatagggatgaataatgatgttacaatttaatacgttttagagctatgctgttttg

SEQ ID NO: 2950 - DNA, 74 bp, Artificial Sequence
  Description of Artificial Sequence: Synthetic oligonucleotide
gaaattaatacgactcactatagggatgaatagtttatagtcttagacctcagttttagagctatgctgttttg

SEQ ID NO: 2951 - DNA, 74 bp, Artificial Sequence
  Description of Artificial Sequence: Synthetic oligonucleotide
gaaattaatacgactcactatagggatgaatatttctggttaaaaagcctaagttttagagctatgctgttttg

SEQ ID NO: 2952 - DNA, 74 bp, Artificial Sequence
  Description of Artificial Sequence: Synthetic oligonucleotide
gaaattaatacgactcactatagggatgaatagaacacccaggttccaggcagttttagagctatgctgttttg

SEQ ID NO: 2953 - DNA, 74 bp, Artificial Sequence
  Description of Artificial Sequence: Synthetic oligonucleotide
gaaattaatacgactcactatagggatgaatagttgattaggctgcaaacaggttttagagctatgctgttttg

SEQ ID NO: 2954 - DNA, 74 bp, Artificial Sequence
  Description of Artificial Sequence: Synthetic oligonucleotide
gaaattaatacgactcactatagggatgaatacaataaactgtatggtcacagttttagagctatgctgttttg

SEQ ID NO: 2955 - DNA, 74 bp, Artificial Sequence
  Description of Artificial Sequence: Synthetic oligonucleotide
gaaattaatacgactcactatagggatgaataactgggtagggactctctgcgttttagagctatgctgttttg

SEQ ID NO: 2956 - DNA, 74 bp, Artificial Sequence
  Description of Artificial Sequence: Synthetic oligonucleotide
gaaattaatacgactcactatagggatgaatactggacagcttggtcccaaggttttagagctatgctgttttg

SEQ ID NO: 2957 - DNA, 74 bp, Artificial Sequence
  Description of Artificial Sequence: Synthetic oligonucleotide
gaaattaatacgactcactatagggatgaataactgaactccctgggaggaagttttagagctatgctgttttg

SEQ ID NO: 2958 - DNA, 74 bp, Artificial Sequence
  Description of Artificial Sequence: Synthetic oligonucleotide
gaaattaatacgactcactatagggatgaatatgagctccctaggggagtgggttttagagctatgctgttttg

SEQ ID NO: 2959 - DNA, 74 bp, Artificial Sequence
  Description of Artificial Sequence: Synthetic oligonucleotide
gaaattaatacgactcactatagggatgaatagcgtttccattcctgggtgcgttttagagctatgctgttttg

SEQ ID NO: 2960 - DNA, 74 bp, Artificial Sequence
  Description of Artificial Sequence: Synthetic oligonucleotide
gaaattaatacgactcactatagggatgaatacaacaagtccttcattgaaggttttagagctatgctgttttg

SEQ ID NO: 2961 - DNA, 74 bp, Artificial Sequence
  Description of Artificial Sequence: Synthetic oligonucleotide
gaaattaatacgactcactatagggatgaataagtcattagatatgggccacgttttagagctatgctgttttg

SEQ ID NO: 2962 - DNA, 74 bp, Artificial Sequence
  Description of Artificial Sequence: Synthetic oligonucleotide
gaaattaatacgactcactatagggatgaataacagagatctgaagctagaagttttagagctatgctgttttg

SEQ ID NO: 2963 - DNA, 74 bp, Artificial Sequence
  Description of Artificial Sequence: Synthetic oligonucleotide
gaaattaatacgactcactatagggatgaataattgtctctggatggcagaggttttagagctatgctgttttg

SEQ ID NO: 2964 - DNA, 74 bp, Artificial Sequence
  Description of Artificial Sequence: Synthetic oligonucleotide
gaaattaatacgactcactatagggatgaatagatgtctatgggtgtgggaggttttagagctatgctgttttg

SEQ ID NO: 2965 - DNA, 74 bp, Artificial Sequence
  Description of Artificial Sequence: Synthetic oligonucleotide
gaaattaatacgactcactatagggatgaataaagagagtccctggtcctacgttttagagctatgctgttttg

SEQ ID NO: 2966 - DNA, 74 bp, Artificial Sequence
  Description of Artificial Sequence: Synthetic oligonucleotide
gaaattaatacgactcactatagggatgaatattaaggggctatagctccaagttttagagctatgctgttttg

SEQ ID NO: 2967 - DNA, 74 bp, Artificial Sequence
  Description of Artificial Sequence: Synthetic oligonucleotide
gaaattaatacgactcactatagggatgaatattgattctttggtggtatccgttttagagctatgctgttttg

SEQ ID NO: 2968 - DNA, 74 bp, Artificial Sequence
  Description of Artificial Sequence: Synthetic oligonucleotide
gaaattaatacgactcactatagggatgaatagagaagagtggtaggagacagttttagagctatgctgttttg

SEQ ID NO: 2969 - DNA, 74 bp, Artificial Sequence
  Description of Artificial Sequence: Synthetic oligonucleotide
gaaattaatacgactcactatagggatgaataaaagtctgaagatctgaggcgttttagagctatgctgttttg

SEQ ID NO: 2970 - DNA, 74 bp, Artificial Sequence
  Description of Artificial Sequence: Synthetic oligonucleotide
gaaattaatacgactcactatagggatgaatagttttagcactgggtaggccgttttagagctatgctgttttg

SEQ ID NO: 2971 - DNA, 74 bp, Artificial Sequence
  Description of Artificial Sequence: Synthetic oligonucleotide
gaaattaatacgactcactatagggatgaatatgtatctgttggtatccgccgttttagagctatgctgttttg

SEQ ID NO: 2972 - DNA, 74 bp, Artificial Sequence
  Description of Artificial Sequence: Synthetic oligonucleotide
gaaattaatacgactcactatagggatgaatagagctttcattcatgggggcgttttagagctatgctgttttg

SEQ ID NO: 2973 - DNA, 74 bp, Artificial Sequence
  Description of Artificial Sequence: Synthetic oligonucleotide
gaaattaatacgactcactatagggatgaatataggtctatgagggatgtccgttttagagctatgctgttttg

SEQ ID NO: 2974 - DNA, 74 bp, Artificial Sequence
  Description of Artificial Sequence: Synthetic oligonucleotide
gaaattaatacgactcactatagggatgaatactggggccagcatagaaccagttttagagctatgctgttttg

SEQ ID NO: 2975 - DNA, 74 bp, Artificial Sequence
  Description of Artificial Sequence: Synthetic oligonucleotide
gaaattaatacgactcactatagggatgaataattgtccctggatttaggaggttttagagctatgctgttttg

SEQ ID NO: 2976 - DNA, 74 bp, Artificial Sequence
  Description of Artificial Sequence: Synthetic oligonucleotide
gaaattaatacgactcactatagggatgaatatgattagcatatgtctagaagttttagagctatgctgttttg

SEQ ID NO: 2977 - DNA, 74 bp, Artificial Sequence
  Description of Artificial Sequence: Synthetic oligonucleotide
gaaattaatacgactcactatagggatgaataccttatggtgacacctgccagttttagagctatgctgttttg

SEQ ID NO: 2978 - DNA, 74 bp, Artificial Sequence
  Description of Artificial Sequence: Synthetic oligonucleotide
gaaattaatacgactcactatagggatgaatatgtttccaatctggagaagagttttagagctatgctgttttg

SEQ ID NO: 2979 - DNA, 74 bp, Artificial Sequence
  Description of Artificial Sequence: Synthetic oligonucleotide
gaaattaatacgactcactatagggatgaatatgtgtgtagtaagcaaacacgttttagagctatgctgttttg

SEQ ID NO: 2980 - DNA, 74 bp, Artificial Sequence
  Description of Artificial Sequence: Synthetic oligonucleotide
gaaattaatacgactcactatagggatgaataatttcatcaacttaggaaaggttttagagctatgctgttttg

SEQ ID NO: 2981 - DNA, 74 bp, Artificial Sequence
  Description of Artificial Sequence: Synthetic oligonucleotide
gaaattaatacgactcactatagggatgaatagaagattctggcggtggcgggttttagagctatgctgttttg

SEQ ID NO: 2982 - DNA, 74 bp, Artificial Sequence
  Description of Artificial Sequence: Synthetic oligonucleotide
gaaattaatacgactcactatagggatgaatagaagaaatctcccagtctgagttttagagctatgctgttttg

SEQ ID NO: 2983 - DNA, 74 bp, Artificial Sequence
  Description of Artificial Sequence: Synthetic oligonucleotide
gaaattaatacgactcactatagggatgaatatagctcctttttcatggaaggttttagagctatgctgttttg

SEQ ID NO: 2984 - DNA, 74 bp, Artificial Sequence
  Description of Artificial Sequence: Synthetic oligonucleotide
gaaattaatacgactcactatagggatgaataagggctaactgaaggcagaggttttagagctatgctgttttg

SEQ ID NO: 2985 - DNA, 74 bp, Artificial Sequence
  Description of Artificial Sequence: Synthetic oligonucleotide
gaaattaatacgactcactatagggatgaataagaccatgtcagtgagacaggttttagagctatgctgttttg

SEQ ID NO: 2986 - DNA, 74 bp, Artificial Sequence
  Description of Artificial Sequence: Synthetic oligonucleotide
gaaattaatacgactcactatagggatgaataactgtgggagcgcagaggaggttttagagctatgctgttttg

SEQ ID NO: 2987 - DNA, 74 bp, Artificial Sequence
  Description of Artificial Sequence: Synthetic oligonucleotide
gaaattaatacgactcactatagggatgaataaggttctggggattaggacagttttagagctatgctgttttg

SEQ ID NO: 2988 - DNA, 74 bp, Artificial Sequence
  Description of Artificial Sequence: Synthetic oligonucleotide
gaaattaatacgactcactatagggatgaataaggttaggtccacccagtacgttttagagctatgctgttttg

SEQ ID NO: 2989 - DNA, 74 bp, Artificial Sequence
  Description of Artificial Sequence: Synthetic oligonucleotide
gaaattaatacgactcactatagggatgaataacaatattttgaatttacaagttttagagctatgctgttttg

SEQ ID NO: 2990 - DNA, 74 bp, Artificial Sequence
  Description of Artificial Sequence: Synthetic oligonucleotide
gaaattaatacgactcactatagggatgaatacataagaattaattgtagacgttttagagctatgctgttttg

SEQ ID NO: 2991 - DNA, 74 bp, Artificial Sequence
  Description of Artificial Sequence: Synthetic oligonucleotide
gaaattaatacgactcactatagggatgaataaatttatgtaatcttgaagcgttttagagctatgctgttttg

SEQ ID NO: 2992 - DNA, 74 bp, Artificial Sequence
  Description of Artificial Sequence: Synthetic oligonucleotide
gaaattaatacgactcactatagggatgaatagagctgggaggggagggagagttttagagctatgctgttttg

SEQ ID NO: 2993 - DNA, 74 bp, Artificial Sequence
  Description of Artificial Sequence: Synthetic oligonucleotide
gaaattaatacgactcactatagggatgaatagggaagacactgtggacacagttttagagctatgctgttttg

SEQ ID NO: 2994 - DNA, 74 bp, Artificial Sequence
  Description of Artificial Sequence: Synthetic oligonucleotide
gaaattaatacgactcactatagggatgaatagatgtaaacacttgtgaggcgttttagagctatgctgttttg

SEQ ID NO: 2995 - DNA, 74 bp, Artificial Sequence
  Description of Artificial Sequence: Synthetic oligonucleotide
gaaattaatacgactcactatagggatgaataaggcttctccccacagcacagttttagagctatgctgttttg

SEQ ID NO: 2996 - DNA, 74 bp, Artificial Sequence
  Description of Artificial Sequence: Synthetic oligonucleotide
gaaattaatacgactcactatagggatgaatacaggctgttgcttcagagaagttttagagctatgctgttttg

SEQ ID NO: 2997 - DNA, 74 bp, Artificial Sequence
  Description of Artificial Sequence: Synthetic oligonucleotide
gaaattaatacgactcactatagggatgaatatggttttgtggaccaggcccgttttagagctatgctgttttg

SEQ ID NO: 2998 - DNA, 74 bp, Artificial Sequence
  Description of Artificial Sequence: Synthetic oligonucleotide
gaaattaatacgactcactatagggatgaatatgttttagcaaagagactgggttttagagctatgctgttttg

SEQ ID NO: 2999 - DNA, 74 bp, Artificial Sequence
  Description of Artificial Sequence: Synthetic oligonucleotide
gaaattaatacgactcactatagggatgaatagttaaaactcaatgccaggcgttttagagctatgctgttttg

SEQ ID NO: 3000 - DNA, 74 bp, Artificial Sequence
  Description of Artificial Sequence: Synthetic oligonucleotide
gaaattaatacgactcactatagggatgaataagaggtgggcctgtttctgggttttagagctatgctgttttg

SEQ ID NO: 3001 - DNA, 74 bp, Artificial Sequence
  Description of Artificial Sequence: Synthetic oligonucleotide
gaaattaatacgactcactatagggatgaatagggccaatctggtgttaggggttttagagctatgctgttttg

SEQ ID NO: 3002 - DNA, 74 bp, Artificial Sequence
  Description of Artificial Sequence: Synthetic oligonucleotide
gaaattaatacgactcactatagggatgaatattggcatggaacctggatcagttttagagctatgctgttttg

SEQ ID NO: 3003 - DNA, 74 bp, Artificial Sequence
  Description of Artificial Sequence: Synthetic oligonucleotide
gaaattaatacgactcactatagggatgaatatgggtacatgaggctaggccgttttagagctatgctgttttg

SEQ ID NO: 3004 - DNA, 74 bp, Artificial Sequence
  Description of Artificial Sequence: Synthetic oligonucleotide
gaaattaatacgactcactatagggatgaatagaatttgggtctacaggtgcgttttagagctatgctgttttg

SEQ ID NO: 3005 - DNA, 74 bp, Artificial Sequence
  Description of Artificial Sequence: Synthetic oligonucleotide
gaaattaatacgactcactatagggatgaataggtcaatcagcaggcaggccgttttagagctatgctgttttg

SEQ ID NO: 3006 - DNA, 74 bp, Artificial Sequence
  Description of Artificial Sequence: Synthetic oligonucleotide
gaaattaatacgactcactatagggatgaataattctgagtggtttggctgagttttagagctatgctgttttg

SEQ ID NO: 3007 - DNA, 74 bp, Artificial Sequence
  Description of Artificial Sequence: Synthetic oligonucleotide
gaaattaatacgactcactatagggatgaatatgaataagaaaaaggagagggttttagagctatgctgttttg

SEQ ID NO: 3008 - DNA, 74 bp, Artificial Sequence
  Description of Artificial Sequence: Synthetic oligonucleotide
gaaattaatacgactcactatagggatgaatacttgcaagacactgcccagggttttagagctatgctgttttg

SEQ ID NO: 3009 - DNA, 74 bp, Artificial Sequence
  Description of Artificial Sequence: Synthetic oligonucleotide
gaaattaatacgactcactatagggatgaataaggtgcaaaatatctgagaagttttagagctatgctgttttg

SEQ ID NO: 3010 - DNA, 74 bp, Artificial Sequence
  Description of Artificial Sequence: Synthetic oligonucleotide
gaaattaatacgactcactatagggatgaatacaggaggatcacttgaggccgttttagagctatgctgttttg

SEQ ID NO: 3011 - DNA, 74 bp, Artificial Sequence
  Description of Artificial Sequence: Synthetic oligonucleotide
gaaattaatacgactcactatagggatgaatatagcacaatcctgagaaaaagttttagagctatgctgttttg

SEQ ID NO: 3012 - DNA, 74 bp, Artificial Sequence
  Description of Artificial Sequence: Synthetic oligonucleotide
gaaattaatacgactcactatagggatgaatacctcctcccctcacagacaagttttagagctatgctgttttg

SEQ ID NO: 3013 - DNA, 74 bp, Artificial Sequence
  Description of Artificial Sequence: Synthetic oligonucleotide
gaaattaatacgactcactatagggatgaatatttggcactcctctacgcacgttttagagctatgctgttttg

SEQ ID NO: 3014 - DNA, 74 bp, Artificial Sequence
  Description of Artificial Sequence: Synthetic oligonucleotide
gaaattaatacgactcactatagggatgaatactagagagttcaggcacccagttttagagctatgctgttttg

SEQ ID NO: 3015 - DNA, 74 bp, Artificial Sequence
  Description of Artificial Sequence: Synthetic oligonucleotide
gaaattaatacgactcactatagggatgaatatctttagagttctattgtgagttttagagctatgctgttttg

SEQ ID NO: 3016 - DNA, 74 bp, Artificial Sequence
  Description of Artificial Sequence: Synthetic oligonucleotide
gaaattaatacgactcactatagggatgaataggaacagtcacctaacaaaggttttagagctatgctgttttg

SEQ ID NO: 3017 - DNA, 74 bp, Artificial Sequence
  Description of Artificial Sequence: Synthetic oligonucleotide
gaaattaatacgactcactatagggatgaatacatgtataggcggggtgcaggttttagagctatgctgttttg

SEQ ID NO: 3018 - DNA, 74 bp, Artificial Sequence
  Description of Artificial Sequence: Synthetic oligonucleotide
gaaattaatacgactcactatagggatgaataaaaccttgaaacttacagccgttttagagctatgctgttttg

SEQ ID NO: 3019 - DNA, 74 bp, Artificial Sequence
  Description of Artificial Sequence: Synthetic oligonucleotide
gaaattaatacgactcactatagggatgaataaatccagccctttgaagagcgttttagagctatgctgttttg

SEQ ID NO: 3020 - DNA, 74 bp, Artificial Sequence
  Description of Artificial Sequence: Synthetic oligonucleotide
gaaattaatacgactcactatagggatgaatacctcataggagcccctggccgttttagagctatgctgttttg

SEQ ID NO: 3021 - DNA, 74 bp, Artificial Sequence
  Description of Artificial Sequence: Synthetic oligonucleotide
gaaattaatacgactcactatagggatgaataactgagcccgaggcacaggagttttagagctatgctgttttg

SEQ ID NO: 3022 - DNA, 74 bp, Artificial Sequence
  Description of Artificial Sequence: Synthetic oligonucleotide
gaaattaatacgactcactatagggatgaatatggggagtggcttcctgaaagttttagagctatgctgttttg

SEQ ID NO: 3023 - DNA, 74 bp, Artificial Sequence
  Description of Artificial Sequence: Synthetic oligonucleotide
gaaattaatacgactcactatagggatgaatatgacaccaatgaggaagtcagttttagagctatgctgttttg

SEQ ID NO: 3024 - DNA, 74 bp, Artificial Sequence
  Description of Artificial Sequence: Synthetic oligonucleotide
gaaattaatacgactcactatagggatgaataagttttgaggctgggcgcgggttttagagctatgctgttttg

SEQ ID NO: 3025 - DNA, 74 bp, Artificial Sequence
  Description of Artificial Sequence: Synthetic oligonucleotide
gaaattaatacgactcactatagggatgaataacacccttgtcaacatgtccgttttagagctatgctgttttg

SEQ ID NO: 3026 - DNA, 74 bp, Artificial Sequence
  Description of Artificial Sequence: Synthetic oligonucleotide
gaaattaatacgactcactatagggatgaataatggttatggacaattaagggttttagagctatgctgttttg

SEQ ID NO: 3027 - DNA, 74 bp, Artificial Sequence
  Description of Artificial Sequence: Synthetic oligonucleotide
gaaattaatacgactcactatagggatgaataaatatcctgtgcggctgagagttttagagctatgctgttttg

SEQ ID NO: 3028 - DNA, 74 bp, Artificial Sequence
  Description of Artificial Sequence: Synthetic oligonucleotide
gaaattaatacgactcactatagggatgaatagctacacgctgtgcctaccagttttagagctatgctgttttg

SEQ ID NO: 3029 - DNA, 74 bp, Artificial Sequence
  Description of Artificial Sequence: Synthetic oligonucleotide
gaaattaatacgactcactatagggatgaatactaggctggcagctctccaggttttagagctatgctgttttg

SEQ ID NO: 3030 - DNA, 74 bp, Artificial Sequence
  Description of Artificial Sequence: Synthetic oligonucleotide
gaaattaatacgactcactatagggatgaatagctctggaagctactcccaagttttagagctatgctgttttg

SEQ ID NO: 3031 - DNA, 74 bp, Artificial Sequence
  Description of Artificial Sequence: Synthetic oligonucleotide
gaaattaatacgactcactatagggatgaataggaaggctttccagaaaggcgttttagagctatgctgttttg

SEQ ID NO: 3032 - DNA, 74 bp, Artificial Sequence
  Description of Artificial Sequence: Synthetic oligonucleotide
gaaattaatacgactcactatagggatgaataaggtttctagtcagggagacgttttagagctatgctgttttg

SEQ ID NO: 3033 - DNA, 74 bp, Artificial Sequence
  Description of Artificial Sequence: Synthetic oligonucleotide
gaaattaatacgactcactatagggatgaataccagcaaaactggagggtgagttttagagctatgctgttttg

SEQ ID NO: 3034 - DNA, 74 bp, Artificial Sequence
  Description of Artificial Sequence: Synthetic oligonucleotide
gaaattaatacgactcactatagggatgaatagaattcccggccgggtgtgggttttagagctatgctgttttg

SEQ ID NO: 3035 - DNA, 74 bp, Artificial Sequence
  Description of Artificial Sequence: Synthetic oligonucleotide
gaaattaatacgactcactatagggatgaataccagaagttcgaggtcaaccgttttagagctatgctgttttg

SEQ ID NO: 3036 - DNA, 74 bp, Artificial Sequence
  Description of Artificial Sequence: Synthetic oligonucleotide
gaaattaatacgactcactatagggatgaataggtttcgggatgtgggaagagttttagagctatgctgttttg

SEQ ID NO: 3037 - DNA, 74 bp, Artificial Sequence
  Description of Artificial Sequence: Synthetic oligonucleotide
gaaattaatacgactcactatagggatgaatatgtctgctgcagacttaaaagttttagagctatgctgttttg

SEQ ID NO: 3038 - DNA, 74 bp, Artificial Sequence
  Description of Artificial Sequence: Synthetic oligonucleotide
gaaattaatacgactcactatagggatgaatatggggtagctgggctgagccgttttagagctatgctgttttg

SEQ ID NO: 3039 - DNA, 74 bp, Artificial Sequence
  Description of Artificial Sequence: Synthetic oligonucleotide
gaaattaatacgactcactatagggatgaatacttgcccaactgtgcaatgagttttagagctatgctgttttg

SEQ ID NO: 3040 - DNA, 74 bp, Artificial Sequence
  Description of Artificial Sequence: Synthetic oligonucleotide
gaaattaatacgactcactatagggatgaatagcattacaaaagaagcacaagttttagagctatgctgttttg

SEQ ID NO: 3041 - DNA, 74 bp, Artificial Sequence
  Description of Artificial Sequence: Synthetic oligonucleotide
gaaattaatacgactcactatagggatgaatactatgtgagtgtggctccgagttttagagctatgctgttttg

SEQ ID NO: 3042 - DNA, 74 bp, Artificial Sequence
  Description of Artificial Sequence: Synthetic oligonucleotide
gaaattaatacgactcactatagggatgaataacagtctaagcttcttgaaggttttagagctatgctgttttg

SEQ ID NO: 3043 - DNA, 74 bp, Artificial Sequence
  Description of Artificial Sequence: Synthetic oligonucleotide
gaaattaatacgactcactatagggatgaatagtattgctggccgggcgtgggttttagagctatgctgttttg

SEQ ID NO: 3044 - DNA, 74 bp, Artificial Sequence
  Description of Artificial Sequence: Synthetic oligonucleotide
gaaattaatacgactcactatagggatgaataggtgacaaatctgtgcaggggttttagagctatgctgttttg

SEQ ID NO: 3045 - DNA, 74 bp, Artificial Sequence
  Description of Artificial Sequence: Synthetic oligonucleotide
gaaattaatacgactcactatagggatgaatagttcagagcatgggtgctgcgttttagagctatgctgttttg

SEQ ID NO: 3046 - DNA, 74 bp, Artificial Sequence
  Description of Artificial Sequence: Synthetic oligonucleotide
gaaattaatacgactcactatagggatgaataaattgcctgttgactactcagttttagagctatgctgttttg

SEQ ID NO: 3047 - DNA, 74 bp, Artificial Sequence
  Description of Artificial Sequence: Synthetic oligonucleotide
gaaattaatacgactcactatagggatgaataattcccaattgaggagaaaggttttagagctatgctgttttg

SEQ ID NO: 3048 - DNA, 74 bp, Artificial Sequence
  Description of Artificial Sequence: Synthetic oligonucleotide
gaaattaatacgactcactatagggatgaataggaatattctggaggaaggggttttagagctatgctgttttg

SEQ ID NO: 3049 - DNA, 74 bp, Artificial Sequence
  Description of Artificial Sequence: Synthetic oligonucleotide
gaaattaatacgactcactatagggatgaatatttctttcagaaggaccagagttttagagctatgctgttttg

SEQ ID NO: 3050 - DNA, 74 bp, Artificial Sequence
  Description of Artificial Sequence: Synthetic oligonucleotide
gaaattaatacgactcactatagggatgaataaaagattccctttattaccagttttagagctatgctgttttg

SEQ ID NO: 3051 - DNA, 74 bp, Artificial Sequence
  Description of Artificial Sequence: Synthetic oligonucleotide
gaaattaatacgactcactatagggatgaataattaattgtaaggatacacagttttagagctatgctgttttg

SEQ ID NO: 3052 - DNA, 74 bp, Artificial Sequence
  Description of Artificial Sequence: Synthetic oligonucleotide
gaaattaatacgactcactatagggatgaatatcacctcactttagttagaagttttagagctatgctgttttg

SEQ ID NO: 3053 - DNA, 74 bp, Artificial Sequence
  Description of Artificial Sequence: Synthetic oligonucleotide
gaaattaatacgactcactatagggatgaatatgaaaagaaggcatacagaagttttagagctatgctgttttg

SEQ ID NO: 3054 - DNA, 74 bp, Artificial Sequence
  Description of Artificial Sequence: Synthetic oligonucleotide
gaaattaatacgactcactatagggatgaatacaataacacacattagggaagttttagagctatgctgttttg

SEQ ID NO: 3055 - DNA, 74 bp, Artificial Sequence
  Description of Artificial Sequence: Synthetic oligonucleotide
gaaattaatacgactcactatagggatgaatattttactctgtctcccacgcgttttagagctatgctgttttg

SEQ ID NO: 3056 - DNA, 74 bp, Artificial Sequence
  Description of Artificial Sequence: Synthetic oligonucleotide
gaaattaatacgactcactatagggatgaatagattgaaggcttttaagcaggttttagagctatgctgttttg

SEQ ID NO: 3057 - DNA, 74 bp, Artificial Sequence
  Description of Artificial Sequence: Synthetic oligonucleotide
gaaattaatacgactcactatagggatgaataaaggacaaaggccctacaaagttttagagctatgctgttttg

SEQ ID NO: 3058 - DNA, 74 bp, Artificial Sequence
  Description of Artificial Sequence: Synthetic oligonucleotide
gaaattaatacgactcactatagggatgaatattttctaagccctagactaggttttagagctatgctgttttg

SEQ ID NO: 3059 - DNA, 74 bp, Artificial Sequence
  Description of Artificial Sequence: Synthetic oligonucleotide
gaaattaatacgactcactatagggatgaatatgggttggttagaataaggagttttagagctatgctgttttg

SEQ ID NO: 3060 - DNA, 74 bp, Artificial Sequence
  Description of Artificial Sequence: Synthetic oligonucleotide
gaaattaatacgactcactatagggatgaataaggaaaggggactctagagcgttttagagctatgctgttttg

SEQ ID NO: 3061 - DNA, 74 bp, Artificial Sequence
  Description of Artificial Sequence: Synthetic oligonucleotide
gaaattaatacgactcactatagggatgaatacgtgtctaccattgatgaaggttttagagctatgctgttttg

SEQ ID NO: 3062 - DNA, 74 bp, Artificial Sequence
  Description of Artificial Sequence: Synthetic oligonucleotide
gaaattaatacgactcactatagggatgaataatatgacttggtgtctaagggttttagagctatgctgttttg

SEQ ID NO: 3063 - DNA, 74 bp, Artificial Sequence
  Description of Artificial Sequence: Synthetic oligonucleotide
gaaattaatacgactcactatagggatgaatattttatggctatgactcagagttttagagctatgctgttttg

SEQ ID NO: 3064 - DNA, 74 bp, Artificial Sequence
  Description of Artificial Sequence: Synthetic oligonucleotide
gaaattaatacgactcactatagggatgaatatatcctcatgacatggcagcgttttagagctatgctgttttg

SEQ ID NO: 3065 - DNA, 74 bp, Artificial Sequence
  Description of Artificial Sequence: Synthetic oligonucleotide
gaaattaatacgactcactatagggatgaatacctgaaatcttgattagggcgttttagagctatgctgttttg

SEQ ID NO: 3066 - DNA, 74 bp, Artificial Sequence
  Description of Artificial Sequence: Synthetic oligonucleotide
gaaattaatacgactcactatagggatgaatacagccagcctggaactgggagttttagagctatgctgttttg

SEQ ID NO: 3067 - DNA, 74 bp, Artificial Sequence
  Description of Artificial Sequence: Synthetic oligonucleotide
gaaattaatacgactcactatagggatgaatatggaagtagatgtcagctgagttttagagctatgctgttttg

SEQ ID NO: 3068 - DNA, 74 bp, Artificial Sequence
  Description of Artificial Sequence: Synthetic oligonucleotide
gaaattaatacgactcactatagggatgaataaggtgctagaagtcatggaagttttagagctatgctgttttg

SEQ ID NO: 3069 - DNA, 74 bp, Artificial Sequence
  Description of Artificial Sequence: Synthetic oligonucleotide
gaaattaatacgactcactatagggatgaataggaacagaaccagaagaaccgttttagagctatgctgttttg

SEQ ID NO: 3070 - DNA, 74 bp, Artificial Sequence
  Description of Artificial Sequence: Synthetic oligonucleotide
gaaattaatacgactcactatagggatgaatagggaaattgaaacctgggaagttttagagctatgctgttttg

SEQ ID NO: 3071 - DNA, 74 bp, Artificial Sequence
  Description of Artificial Sequence: Synthetic oligonucleotide
gaaattaatacgactcactatagggatgaataaggagactatgtatctgcgggttttagagctatgctgttttg

SEQ ID NO: 3072 - DNA, 74 bp, Artificial Sequence
  Description of Artificial Sequence: Synthetic oligonucleotide
gaaattaatacgactcactatagggatgaatagaaattgcccatgaggccccgttttagagctatgctgttttg

SEQ ID NO: 3073 - DNA, 74 bp, Artificial Sequence
  Description of Artificial Sequence: Synthetic oligonucleotide
gaaattaatacgactcactatagggatgaatatcacctttcagcaagaacaggttttagagctatgctgttttg

SEQ ID NO: 3074 - DNA, 74 bp, Artificial Sequence
  Description of Artificial Sequence: Synthetic oligonucleotide
gaaattaatacgactcactatagggatgaatagctcctttgttagccaaccagttttagagctatgctgttttg

SEQ ID NO: 3075 - DNA, 74 bp, Artificial Sequence
  Description of Artificial Sequence: Synthetic oligonucleotide
gaaattaatacgactcactatagggatgaataccaagagcaggggtccagaagttttagagctatgctgttttg

SEQ ID NO: 3076 - DNA, 74 bp, Artificial Sequence
  Description of Artificial Sequence: Synthetic oligonucleotide
gaaattaatacgactcactatagggatgaataccacattcctcagcagaagcgttttagagctatgctgttttg

SEQ ID NO: 3077 - DNA, 74 bp, Artificial Sequence
  Description of Artificial Sequence: Synthetic oligonucleotide
gaaattaatacgactcactatagggatgaataaatgccctcaaatgcgagaagttttagagctatgctgttttg

SEQ ID NO: 3078 - DNA, 74 bp, Artificial Sequence
  Description of Artificial Sequence: Synthetic oligonucleotide
gaaattaatacgactcactatagggatgaatagatgagcttggctaatggacgttttagagctatgctgttttg

SEQ ID NO: 3079 - DNA, 74 bp, Artificial Sequence
  Description of Artificial Sequence: Synthetic oligonucleotide
gaaattaatacgactcactatagggatgaatatctagctgctgcttaacaacgttttagagctatgctgttttg

SEQ ID NO: 3080 - DNA, 74 bp, Artificial Sequence
  Description of Artificial Sequence: Synthetic oligonucleotide
gaaattaatacgactcactatagggatgaataacttactgagttcatgggacgttttagagctatgctgttttg

SEQ ID NO: 3081 - DNA, 74 bp, Artificial Sequence
  Description of Artificial Sequence: Synthetic oligonucleotide
gaaattaatacgactcactatagggatgaataagagaggaaggagtcaacaggttttagagctatgctgttttg

SEQ ID NO: 3082 - DNA, 74 bp, Artificial Sequence
  Description of Artificial Sequence: Synthetic oligonucleotide
gaaattaatacgactcactatagggatgaataccttggaagtccattgagcagttttagagctatgctgttttg

SEQ ID NO: 3083 - DNA, 74 bp, Artificial Sequence
  Description of Artificial Sequence: Synthetic oligonucleotide
gaaattaatacgactcactatagggatgaatatggtagttcaacaagccaaggttttagagctatgctgttttg

SEQ ID NO: 3084 - DNA, 74 bp, Artificial Sequence
  Description of Artificial Sequence: Synthetic oligonucleotide
gaaattaatacgactcactatagggatgaatagctaattctaaggcaaacccgttttagagctatgctgttttg

SEQ ID NO: 3085 - DNA, 74 bp, Artificial Sequence
  Description of Artificial Sequence: Synthetic oligonucleotide
gaaattaatacgactcactatagggatgaatagggcggggccgcgagcgcaggttttagagctatgctgttttg

SEQ ID NO: 3086 - DNA, 74 bp, Artificial Sequence
  Description of Artificial Sequence: Synthetic oligonucleotide
gaaattaatacgactcactatagggatgaataaggccgtaccaagacggggcgttttagagctatgctgttttg

SEQ ID NO: 3087 - DNA, 74 bp, Artificial Sequence
  Description of Artificial Sequence: Synthetic oligonucleotide
gaaattaatacgactcactatagggatgaataacatgtcgcgagcggggtcagttttagagctatgctgttttg

SEQ ID NO: 3088 - DNA, 74 bp, Artificial Sequence
  Description of Artificial Sequence: Synthetic oligonucleotide
gaaattaatacgactcactatagggatgaatagtgccccagctcgcaaccccgttttagagctatgctgttttg

SEQ ID NO: 3089 - DNA, 74 bp, Artificial Sequence
  Description of Artificial Sequence: Synthetic oligonucleotide
gaaattaatacgactcactatagggatgaatacctccgcggggggcccgcccgttttagagctatgctgttttg

SEQ ID NO: 3090 - DNA, 74 bp, Artificial Sequence
  Description of Artificial Sequence: Synthetic oligonucleotide
gaaattaatacgactcactatagggatgaataaagcggttccccctggcagcgttttagagctatgctgttttg

SEQ ID NO: 3091 - DNA, 74 bp, Artificial Sequence
  Description of Artificial Sequence: Synthetic oligonucleotide
gaaattaatacgactcactatagggatgaatatgtcccgggctcagagacacgttttagagctatgctgttttg

SEQ ID NO: 3092 - DNA, 74 bp, Artificial Sequence
  Description of Artificial Sequence: Synthetic oligonucleotide
gaaattaatacgactcactatagggatgaatatctcttaccatcctcaaacggttttagagctatgctgttttg

SEQ ID NO: 3093 - DNA, 74 bp, Artificial Sequence
  Description of Artificial Sequence: Synthetic oligonucleotide
gaaattaatacgactcactatagggatgaatagcagaggcaggttcctaagcgttttagagctatgctgttttg

SEQ ID NO: 3094 - DNA, 74 bp, Artificial Sequence
  Description of Artificial Sequence: Synthetic oligonucleotide
gaaattaatacgactcactatagggatgaatattttaagaaagcaagaagaagttttagagctatgctgttttg

SEQ ID NO: 3095 - DNA, 74 bp, Artificial Sequence
  Description of Artificial Sequence: Synthetic oligonucleotide
gaaattaatacgactcactatagggatgaatattatactaattcagtgatgggttttagagctatgctgttttg

SEQ ID NO: 3096 - DNA, 74 bp, Artificial Sequence
  Description of Artificial Sequence: Synthetic oligonucleotide
gaaattaatacgactcactatagggatgaatatttcctatggaccaacatgcgttttagagctatgctgttttg

SEQ ID NO: 3097 - DNA, 74 bp, Artificial Sequence
  Description of Artificial Sequence: Synthetic oligonucleotide
gaaattaatacgactcactatagggatgaatagggtctttggagaagggaaggttttagagctatgctgttttg

SEQ ID NO: 3098 - DNA, 74 bp, Artificial Sequence
  Description of Artificial Sequence: Synthetic oligonucleotide
gaaattaatacgactcactatagggatgaatatgtatgcttcctgaataaaagttttagagctatgctgttttg

SEQ ID NO: 3099 - DNA, 74 bp, Artificial Sequence
  Description of Artificial Sequence: Synthetic oligonucleotide
gaaattaatacgactcactatagggatgaatatctccattatagctttcacagttttagagctatgctgttttg

SEQ ID NO: 3100 - DNA, 74 bp, Artificial Sequence
  Description of Artificial Sequence: Synthetic oligonucleotide
gaaattaatacgactcactatagggatgaataaaaggatgacaggcctccgcgttttagagctatgctgttttg

SEQ ID NO: 3101 - DNA, 74 bp, Artificial Sequence
  Description of Artificial Sequence: Synthetic oligonucleotide
gaaattaatacgactcactatagggatgaatataaacatgcagctgccgacggttttagagctatgctgttttg

SEQ ID NO: 3102 - DNA, 74 bp, Artificial Sequence
  Description of Artificial Sequence: Synthetic oligonucleotide
gaaattaatacgactcactatagggatgaatactgatagtgatggtttggaagttttagagctatgctgttttg

SEQ ID NO: 3103 - DNA, 74 bp, Artificial Sequence
  Description of Artificial Sequence: Synthetic oligonucleotide
gaaattaatacgactcactatagggatgaatactttgtgttgggccaagacagttttagagctatgctgttttg

SEQ ID NO: 3104 - DNA, 74 bp, Artificial Sequence
  Description of Artificial Sequence: Synthetic oligonucleotide
gaaattaatacgactcactatagggatgaataaggatcctcaactagacagagttttagagctatgctgttttg

SEQ ID NO: 3105 - DNA, 74 bp, Artificial Sequence
  Description of Artificial Sequence: Synthetic oligonucleotide
gaaattaatacgactcactatagggatgaataattagacctatatctggagagttttagagctatgctgttttg

SEQ ID NO: 3106 - DNA, 74 bp, Artificial Sequence
  Description of Artificial Sequence: Synthetic oligonucleotide
gaaattaatacgactcactatagggatgaataagtggcatgtttatgtatcagttttagagctatgctgttttg

SEQ ID NO: 3107 - DNA, 74 bp, Artificial Sequence
  Description of Artificial Sequence: Synthetic oligonucleotide
gaaattaatacgactcactatagggatgaatagggggaaaacagctttgaaagttttagagctatgctgttttg

SEQ ID NO: 3108 - DNA, 74 bp, Artificial Sequence
  Description of Artificial Sequence: Synthetic oligonucleotide
gaaattaatacgactcactatagggatgaatagatataaagcctcaccagaggttttagagctatgctgttttg

SEQ ID NO: 3109 - DNA, 74 bp, Artificial Sequence
  Description of Artificial Sequence: Synthetic oligonucleotide
gaaattaatacgactcactatagggatgaatacatttgggtgtgctggggaggttttagagctatgctgttttg

SEQ ID NO: 3110 - DNA, 74 bp, Artificial Sequence
  Description of Artificial Sequence: Synthetic oligonucleotide
gaaattaatacgactcactatagggatgaataatttcttgtatgatgaatgagttttagagctatgctgttttg

SEQ ID NO: 3111 - DNA, 74 bp, Artificial Sequence
  Description of Artificial Sequence: Synthetic oligonucleotide
gaaattaatacgactcactatagggatgaatagttgtgtgaagtagtggggggttttagagctatgctgttttg

SEQ ID NO: 3112 - DNA, 74 bp, Artificial Sequence
  Description of Artificial Sequence: Synthetic oligonucleotide
gaaattaatacgactcactatagggatgaataccggtcacactgtgacagaggttttagagctatgctgttttg

SEQ ID NO: 3113 - DNA, 74 bp, Artificial Sequence
  Description of Artificial Sequence: Synthetic oligonucleotide
gaaattaatacgactcactatagggatgaatactttttccacagcaacgtgcgttttagagctatgctgttttg

SEQ ID NO: 3114 - DNA, 74 bp, Artificial Sequence
  Description of Artificial Sequence: Synthetic oligonucleotide
gaaattaatacgactcactatagggatgaatataaattatcctctctaacaggttttagagctatgctgttttg

SEQ ID NO: 3115 - DNA, 74 bp, Artificial Sequence
  Description of Artificial Sequence: Synthetic oligonucleotide
gaaattaatacgactcactatagggatgaatacagccccccattagaactgggttttagagctatgctgttttg

SEQ ID NO: 3116 - DNA, 74 bp, Artificial Sequence
  Description of Artificial Sequence: Synthetic oligonucleotide
gaaattaatacgactcactatagggatgaatagaggctataatgagctatgagttttagagctatgctgttttg

SEQ ID NO: 3117 - DNA, 74 bp, Artificial Sequence
  Description of Artificial Sequence: Synthetic oligonucleotide
gaaattaatacgactcactatagggatgaataagtgaacagggattttcaacgttttagagctatgctgttttg

SEQ ID NO: 3118 - DNA, 74 bp, Artificial Sequence
  Description of Artificial Sequence: Synthetic oligonucleotide
gaaattaatacgactcactatagggatgaatattaagagttctggcacgcacgttttagagctatgctgttttg

SEQ ID NO: 3119 - DNA, 74 bp, Artificial Sequence
  Description of Artificial Sequence: Synthetic oligonucleotide
gaaattaatacgactcactatagggatgaatatcagctggagaagccgggcggttttagagctatgctgttttg

SEQ ID NO: 3120 - DNA, 74 bp, Artificial Sequence
  Description of Artificial Sequence: Synthetic oligonucleotide
gaaattaatacgactcactatagggatgaataaagtaggaagcaaaggaagggttttagagctatgctgttttg

SEQ ID NO: 3121 - DNA, 74 bp, Artificial Sequence
  Description of Artificial Sequence: Synthetic oligonucleotide
gaaattaatacgactcactatagggatgaataactttattagcatcatctccgttttagagctatgctgttttg

SEQ ID NO: 3122 - DNA, 74 bp, Artificial Sequence
  Description of Artificial Sequence: Synthetic oligonucleotide
gaaattaatacgactcactatagggatgaatactgagtgaatattgcaatcagttttagagctatgctgttttg

SEQ ID NO: 3123 - DNA, 74 bp, Artificial Sequence
  Description of Artificial Sequence: Synthetic oligonucleotide
gaaattaatacgactcactatagggatgaataatagtgtggctttgtaaccagttttagagctatgctgttttg

SEQ ID NO: 3124 - DNA, 74 bp, Artificial Sequence
  Description of Artificial Sequence: Synthetic oligonucleotide
gaaattaatacgactcactatagggatgaataatatattgaggtatgcaacagttttagagctatgctgttttg

SEQ ID NO: 3125 - DNA, 74 bp, Artificial Sequence
  Description of Artificial Sequence: Synthetic oligonucleotide
gaaattaatacgactcactatagggatgaataggggctgcctggaggtggcagttttagagctatgctgttttg

SEQ ID NO: 3126 - DNA, 74 bp, Artificial Sequence
  Description of Artificial Sequence: Synthetic oligonucleotide
gaaattaatacgactcactatagggatgaatacggaggaagtgaagggggccgttttagagctatgctgttttg

SEQ ID NO: 3127 - DNA, 74 bp, Artificial Sequence
  Description of Artificial Sequence: Synthetic oligonucleotide
gaaattaatacgactcactatagggatgaatacaggccagtcccaggcaaacgttttagagctatgctgttttg

SEQ ID NO: 3128 - DNA, 74 bp, Artificial Sequence
  Description of Artificial Sequence: Synthetic oligonucleotide
gaaattaatacgactcactatagggatgaatacaggcagaagagagggaggggttttagagctatgctgttttg

SEQ ID NO: 3129 - DNA, 74 bp, Artificial Sequence
  Description of Artificial Sequence: Synthetic oligonucleotide
gaaattaatacgactcactatagggatgaataagagttgctttagcctccacgttttagagctatgctgttttg

SEQ ID NO: 3130 - DNA, 74 bp, Artificial Sequence
  Description of Artificial Sequence: Synthetic oligonucleotide
gaaattaatacgactcactatagggatgaataactaggatcaatacataaacgttttagagctatgctgttttg

SEQ ID NO: 3131 - DNA, 74 bp, Artificial Sequence
  Description of Artificial Sequence: Synthetic oligonucleotide
gaaattaatacgactcactatagggatgaatagtgacagcaagacaaaatgggttttagagctatgctgttttg

SEQ ID NO: 3132 - DNA, 74 bp, Artificial Sequence
  Description of Artificial Sequence: Synthetic oligonucleotide
gaaattaatacgactcactatagggatgaatagctgtatcaagatggcgccagttttagagctatgctgttttg

SEQ ID NO: 3133 - DNA, 74 bp, Artificial Sequence
  Description of Artificial Sequence: Synthetic oligonucleotide
gaaattaatacgactcactatagggatgaatactttgtggtaacatcaagacgttttagagctatgctgttttg

SEQ ID NO: 3134 - DNA, 74 bp, Artificial Sequence
  Description of Artificial Sequence: Synthetic oligonucleotide
gaaattaatacgactcactatagggatgaatattaacttttcagggccaaccgttttagagctatgctgttttg

SEQ ID NO: 3135 - DNA, 74 bp, Artificial Sequence
  Description of Artificial Sequence: Synthetic oligonucleotide
gaaattaatacgactcactatagggatgaataatatggccccttcccagagcgttttagagctatgctgttttg

SEQ ID NO: 3136 - DNA, 74 bp, Artificial Sequence
  Description of Artificial Sequence: Synthetic oligonucleotide
gaaattaatacgactcactatagggatgaataactgactttgtatggaatccgttttagagctatgctgttttg

SEQ ID NO: 3137 - DNA, 74 bp, Artificial Sequence
  Description of Artificial Sequence: Synthetic oligonucleotide
gaaattaatacgactcactatagggatgaatatggcaaaccatttgctatccgttttagagctatgctgttttg

SEQ ID NO: 3138 - DNA, 74 bp, Artificial Sequence
  Description of Artificial Sequence: Synthetic oligonucleotide
gaaattaatacgactcactatagggatgaatatcaacaatcctgcttcaggagttttagagctatgctgttttg

SEQ ID NO: 3139 - DNA, 74 bp, Artificial Sequence
  Description of Artificial Sequence: Synthetic oligonucleotide
gaaattaatacgactcactatagggatgaataagtaaagagctcttaaccgggttttagagctatgctgttttg

SEQ ID NO: 3140 - DNA, 74 bp, Artificial Sequence
  Description of Artificial Sequence: Synthetic oligonucleotide
gaaattaatacgactcactatagggatgaatacatcagagcctgagagccgagttttagagctatgctgttttg

SEQ ID NO: 3141 - DNA, 74 bp, Artificial Sequence
  Description of Artificial Sequence: Synthetic oligonucleotide
gaaattaatacgactcactatagggatgaatatctgcagctttatagtatgcgttttagagctatgctgttttg

SEQ ID NO: 3142 - DNA, 74 bp, Artificial Sequence
  Description of Artificial Sequence: Synthetic oligonucleotide
gaaattaatacgactcactatagggatgaatacatgacaatgaagcaaaaaggttttagagctatgctgttttg

SEQ ID NO: 3143 - DNA, 74 bp, Artificial Sequence
  Description of Artificial Sequence: Synthetic oligonucleotide
gaaattaatacgactcactatagggatgaatagcagacttcccatctaggccgttttagagctatgctgttttg

SEQ ID NO: 3144 - DNA, 74 bp, Artificial Sequence
  Description of Artificial Sequence: Synthetic oligonucleotide
gaaattaatacgactcactatagggatgaatagcagtgttaatggactgtaagttttagagctatgctgttttg

SEQ ID NO: 3145 - DNA, 74 bp, Artificial Sequence
  Description of Artificial Sequence: Synthetic oligonucleotide
gaaattaatacgactcactatagggatgaataaaataaaaagatcctgaacagttttagagctatgctgttttg

SEQ ID NO: 3146 - DNA, 74 bp, Artificial Sequence
  Description of Artificial Sequence: Synthetic oligonucleotide
gaaattaatacgactcactatagggatgaatatagttatccgctgaggggaagttttagagctatgctgttttg

SEQ ID NO: 3147 - DNA, 74 bp, Artificial Sequence
  Description of Artificial Sequence: Synthetic oligonucleotide
gaaattaatacgactcactatagggatgaatacaagatgtggataagtagaagttttagagctatgctgttttg

SEQ ID NO: 3148 - DNA, 74 bp, Artificial Sequence
  Description of Artificial Sequence: Synthetic oligonucleotide
gaaattaatacgactcactatagggatgaataggttcaacctaacagaagaagttttagagctatgctgttttg

SEQ ID NO: 3149 - DNA, 74 bp, Artificial Sequence
  Description of Artificial Sequence: Synthetic oligonucleotide
gaaattaatacgactcactatagggatgaataataaaatgctggtcatacccgttttagagctatgctgttttg

SEQ ID NO: 3150 - DNA, 74 bp, Artificial Sequence
  Description of Artificial Sequence: Synthetic oligonucleotide
gaaattaatacgactcactatagggatgaatacttaaggatggtttttcccagttttagagctatgctgttttg

SEQ ID NO: 3151 - DNA, 74 bp, Artificial Sequence
  Description of Artificial Sequence: Synthetic oligonucleotide
gaaattaatacgactcactatagggatgaataatgagcgccacgccggctccgttttagagctatgctgttttg

SEQ ID NO: 3152 - DNA, 74 bp, Artificial Sequence
  Description of Artificial Sequence: Synthetic oligonucleotide
gaaattaatacgactcactatagggatgaataggagggtcccggaggaggcggttttagagctatgctgttttg

SEQ ID NO: 3153 - DNA, 74 bp, Artificial Sequence
  Description of Artificial Sequence: Synthetic oligonucleotide
gaaattaatacgactcactatagggatgaataaaggagggaaagcgggggaggttttagagctatgctgttttg

SEQ ID NO: 3154 - DNA, 74 bp, Artificial Sequence
  Description of Artificial Sequence: Synthetic oligonucleotide
gaaattaatacgactcactatagggatgaatattttacagaacatgccggaagttttagagctatgctgttttg

SEQ ID NO: 3155 - DNA, 74 bp, Artificial Sequence
  Description of Artificial Sequence: Synthetic oligonucleotide
gaaattaatacgactcactatagggatgaatacgttgttcctttttcgaagggttttagagctatgctgttttg

SEQ ID NO: 3156 - DNA, 74 bp, Artificial Sequence
  Description of Artificial Sequence: Synthetic oligonucleotide
gaaattaatacgactcactatagggatgaatataattagccaggtgtggtgggttttagagctatgctgttttg

SEQ ID NO: 3157 - DNA, 74 bp, Artificial Sequence
  Description of Artificial Sequence: Synthetic oligonucleotide
gaaattaatacgactcactatagggatgaatagctagtttttttagtagagggttttagagctatgctgttttg

SEQ ID NO: 3158 - DNA, 74 bp, Artificial Sequence
  Description of Artificial Sequence: Synthetic oligonucleotide
gaaattaatacgactcactatagggatgaataagggctgcgccatgttgcccgttttagagctatgctgttttg

SEQ ID NO: 3159 - DNA, 74 bp, Artificial Sequence
  Description of Artificial Sequence: Synthetic oligonucleotide
gaaattaatacgactcactatagggatgaataaggcttaaaaactattataagttttagagctatgctgttttg

SEQ ID NO: 3160 - DNA, 74 bp, Artificial Sequence
  Description of Artificial Sequence: Synthetic oligonucleotide
gaaattaatacgactcactatagggatgaatacatagaaaggttaagtcacagttttagagctatgctgttttg

SEQ ID NO: 3161 - DNA, 74 bp, Artificial Sequence
  Description of Artificial Sequence: Synthetic oligonucleotide
gaaattaatacgactcactatagggatgaatactacaaggattactggcagagttttagagctatgctgttttg

SEQ ID NO: 3162 - DNA, 74 bp, Artificial Sequence
  Description of Artificial Sequence: Synthetic oligonucleotide
gaaattaatacgactcactatagggatgaataagaaagcttttggtataaaggttttagagctatgctgttttg

SEQ ID NO: 3163 - DNA, 74 bp, Artificial Sequence
  Description of Artificial Sequence: Synthetic oligonucleotide
gaaattaatacgactcactatagggatgaatagtgggtgcaataaagtatgcgttttagagctatgctgttttg

SEQ ID NO: 3164 - DNA, 74 bp, Artificial Sequence
  Description of Artificial Sequence: Synthetic oligonucleotide
gaaattaatacgactcactatagggatgaataggatctaagtgaaatggagggttttagagctatgctgttttg

SEQ ID NO: 3165 - DNA, 74 bp, Artificial Sequence
  Description of Artificial Sequence: Synthetic oligonucleotide
gaaattaatacgactcactatagggatgaatatcaaaggcaaaataagagaagttttagagctatgctgttttg

SEQ ID NO: 3166 - DNA, 74 bp, Artificial Sequence
  Description of Artificial Sequence: Synthetic oligonucleotide
gaaattaatacgactcactatagggatgaatagcataaatcagggttgccccgttttagagctatgctgttttg

SEQ ID NO: 3167 - DNA, 74 bp, Artificial Sequence
  Description of Artificial Sequence: Synthetic oligonucleotide
gaaattaatacgactcactatagggatgaatatggtggtcctgcctaggtccgttttagagctatgctgttttg

SEQ ID NO: 3168 - DNA, 74 bp, Artificial Sequence
  Description of Artificial Sequence: Synthetic oligonucleotide
gaaattaatacgactcactatagggatgaatactgagtagtggctattgagggttttagagctatgctgttttg

SEQ ID NO: 3169 - DNA, 74 bp, Artificial Sequence
  Description of Artificial Sequence: Synthetic oligonucleotide
gaaattaatacgactcactatagggatgaatacttagtgaagagctaggggcgttttagagctatgctgttttg

SEQ ID NO: 3170 - DNA, 74 bp, Artificial Sequence
  Description of Artificial Sequence: Synthetic oligonucleotide
gaaattaatacgactcactatagggatgaataaggccagcgccatcttctcagttttagagctatgctgttttg

SEQ ID NO: 3171 - DNA, 74 bp, Artificial Sequence
  Description of Artificial Sequence: Synthetic oligonucleotide
gaaattaatacgactcactatagggatgaatacagacagtgtgccaccagcagttttagagctatgctgttttg

SEQ ID NO: 3172 - DNA, 74 bp, Artificial Sequence
  Description of Artificial Sequence: Synthetic oligonucleotide
gaaattaatacgactcactatagggatgaatatgagaagatttaatgtgaaggttttagagctatgctgttttg

SEQ ID NO: 3173 - DNA, 74 bp, Artificial Sequence
  Description of Artificial Sequence: Synthetic oligonucleotide
gaaattaatacgactcactatagggatgaatagcacctcttgtcctgtcccagttttagagctatgctgttttg

SEQ ID NO: 3174 - DNA, 74 bp, Artificial Sequence
  Description of Artificial Sequence: Synthetic oligonucleotide
gaaattaatacgactcactatagggatgaatattggctaccgaccaggagcagttttagagctatgctgttttg

SEQ ID NO: 3175 - DNA, 74 bp, Artificial Sequence
  Description of Artificial Sequence: Synthetic oligonucleotide
gaaattaatacgactcactatagggatgaataaaatcccaagggtatacaccgttttagagctatgctgttttg

SEQ ID NO: 3176 - DNA, 74 bp, Artificial Sequence
  Description of Artificial Sequence: Synthetic oligonucleotide
gaaattaatacgactcactatagggatgaatacctgtgtactggggggcagggttttagagctatgctgttttg

SEQ ID NO: 3177 - DNA, 74 bp, Artificial Sequence
  Description of Artificial Sequence: Synthetic oligonucleotide
gaaattaatacgactcactatagggatgaatacctgcagtttcagcgagtcggttttagagctatgctgttttg

SEQ ID NO: 3178 - DNA, 74 bp, Artificial Sequence
  Description of Artificial Sequence: Synthetic oligonucleotide
gaaattaatacgactcactatagggatgaataccactgacactgtcatagccgttttagagctatgctgttttg

SEQ ID NO: 3179 - DNA, 74 bp, Artificial Sequence
  Description of Artificial Sequence: Synthetic oligonucleotide
gaaattaatacgactcactatagggatgaataaggcccagccacgtgcccacgttttagagctatgctgttttg

SEQ ID NO: 3180 - DNA, 74 bp, Artificial Sequence
  Description of Artificial Sequence: Synthetic oligonucleotide
gaaattaatacgactcactatagggatgaatagctggggcgggcatgccccagttttagagctatgctgttttg

SEQ ID NO: 3181 - DNA, 74 bp, Artificial Sequence
  Description of Artificial Sequence: Synthetic oligonucleotide
gaaattaatacgactcactatagggatgaataaggaccaagctcaaacctccgttttagagctatgctgttttg

SEQ ID NO: 3182 - DNA, 74 bp, Artificial Sequence
  Description of Artificial Sequence: Synthetic oligonucleotide
gaaattaatacgactcactatagggatgaataggtcccctttgatccaaagggttttagagctatgctgttttg

SEQ ID NO: 3183 - DNA, 74 bp, Artificial Sequence
  Description of Artificial Sequence: Synthetic oligonucleotide
gaaattaatacgactcactatagggatgaatacaggcagtgggcttgaatccgttttagagctatgctgttttg

SEQ ID NO: 3184 - DNA, 74 bp, Artificial Sequence
  Description of Artificial Sequence: Synthetic oligonucleotide
gaaattaatacgactcactatagggatgaatagagacagaatatgggggtgggttttagagctatgctgttttg

SEQ ID NO: 3185 - DNA, 74 bp, Artificial Sequence
  Description of Artificial Sequence: Synthetic oligonucleotide
gaaattaatacgactcactatagggatgaatagaacctgtagggccctggccgttttagagctatgctgttttg

SEQ ID NO: 3186 - DNA, 74 bp, Artificial Sequence
  Description of Artificial Sequence: Synthetic oligonucleotide
gaaattaatacgactcactatagggatgaatatcagtcgctggtggagggcggttttagagctatgctgttttg

SEQ ID NO: 3187 - DNA, 74 bp, Artificial Sequence
  Description of Artificial Sequence: Synthetic oligonucleotide
gaaattaatacgactcactatagggatgaatagttggtgagggacatgggcagttttagagctatgctgttttg

SEQ ID NO: 3188 - DNA, 74 bp, Artificial Sequence
  Description of Artificial Sequence: Synthetic oligonucleotide
gaaattaatacgactcactatagggatgaataaggggaactggatttacccagttttagagctatgctgttttg

SEQ ID NO: 3189 - DNA, 74 bp, Artificial Sequence
  Description of Artificial Sequence: Synthetic oligonucleotide
gaaattaatacgactcactatagggatgaataagaaagcaaagttggagtgggttttagagctatgctgttttg

SEQ ID NO: 3190 - DNA, 74 bp, Artificial Sequence
  Description of Artificial Sequence: Synthetic oligonucleotide
gaaattaatacgactcactatagggatgaatacttcgtactggggtcaaggggttttagagctatgctgttttg

SEQ ID NO: 3191 - DNA, 74 bp, Artificial Sequence
  Description of Artificial Sequence: Synthetic oligonucleotide
gaaattaatacgactcactatagggatgaatataattctggcagaaacagaagttttagagctatgctgttttg

SEQ ID NO: 3192 - DNA, 74 bp, Artificial Sequence
  Description of Artificial Sequence: Synthetic oligonucleotide
gaaattaatacgactcactatagggatgaatactttcttgccccttgggcccgttttagagctatgctgttttg

SEQ ID NO: 3193 - DNA, 74 bp, Artificial Sequence
  Description of Artificial Sequence: Synthetic oligonucleotide
gaaattaatacgactcactatagggatgaatacttctagaagtacatggggcgttttagagctatgctgttttg

SEQ ID NO: 3194 - DNA, 74 bp, Artificial Sequence
  Description of Artificial Sequence: Synthetic oligonucleotide
gaaattaatacgactcactatagggatgaataccttgaaaggagtgaaatgggttttagagctatgctgttttg

SEQ ID NO: 3195 - DNA, 74 bp, Artificial Sequence
  Description of Artificial Sequence: Synthetic oligonucleotide
gaaattaatacgactcactatagggatgaatatttctctcatgacccccaaggttttagagctatgctgttttg

SEQ ID NO: 3196 - DNA, 74 bp, Artificial Sequence
  Description of Artificial Sequence: Synthetic oligonucleotide
gaaattaatacgactcactatagggatgaatatgggaaaccaaggcacagaggttttagagctatgctgttttg

SEQ ID NO: 3197 - DNA, 74 bp, Artificial Sequence
  Description of Artificial Sequence: Synthetic oligonucleotide
gaaattaatacgactcactatagggatgaatagctcccattaggagcaggaagttttagagctatgctgttttg

SEQ ID NO: 3198 - DNA, 74 bp, Artificial Sequence
  Description of Artificial Sequence: Synthetic oligonucleotide
gaaattaatacgactcactatagggatgaataaatccttttaggaatgggacgttttagagctatgctgttttg

SEQ ID NO: 3199 - DNA, 74 bp, Artificial Sequence
  Description of Artificial Sequence: Synthetic oligonucleotide
gaaattaatacgactcactatagggatgaataggtcttcaggactgaagagggttttagagctatgctgttttg

SEQ ID NO: 3200 - DNA, 74 bp, Artificial Sequence
  Description of Artificial Sequence: Synthetic oligonucleotide
gaaattaatacgactcactatagggatgaatagggctaaaagtttttgagacgttttagagctatgctgttttg

SEQ ID NO: 3201 - DNA, 74 bp, Artificial Sequence
  Description of Artificial Sequence: Synthetic oligonucleotide
gaaattaatacgactcactatagggatgaatatggctgcatttctgcaaagggttttagagctatgctgttttg

SEQ ID NO: 3202 - DNA, 74 bp, Artificial Sequence
  Description of Artificial Sequence: Synthetic oligonucleotide
gaaattaatacgactcactatagggatgaatacttagtggtagcaaccagaagttttagagctatgctgttttg

SEQ ID NO: 3203 - DNA, 74 bp, Artificial Sequence
  Description of Artificial Sequence: Synthetic oligonucleotide
gaaattaatacgactcactatagggatgaatagagacattgaaagaaactccgttttagagctatgctgttttg

SEQ ID NO: 3204 - DNA, 74 bp, Artificial Sequence
  Description of Artificial Sequence: Synthetic oligonucleotide
gaaattaatacgactcactatagggatgaatacagtagttctacttctctgagttttagagctatgctgttttg

SEQ ID NO: 3205 - DNA, 74 bp, Artificial Sequence
  Description of Artificial Sequence: Synthetic oligonucleotide
gaaattaatacgactcactatagggatgaatagcactctcatatgctgcggagttttagagctatgctgttttg

SEQ ID NO: 3206 - DNA, 74 bp, Artificial Sequence
  Description of Artificial Sequence: Synthetic oligonucleotide
gaaattaatacgactcactatagggatgaataagaatattaaggtggcatgcgttttagagctatgctgttttg

SEQ ID NO: 3207 - DNA, 74 bp, Artificial Sequence
  Description of Artificial Sequence: Synthetic oligonucleotide
gaaattaatacgactcactatagggatgaatatgggtgggggatggggagaggttttagagctatgctgttttg

SEQ ID NO: 3208 - DNA, 74 bp, Artificial Sequence
  Description of Artificial Sequence: Synthetic oligonucleotide
gaaattaatacgactcactatagggatgaatatgtctcctgcctctcacagcgttttagagctatgctgttttg

SEQ ID NO: 3209 - DNA, 74 bp, Artificial Sequence
  Description of Artificial Sequence: Synthetic oligonucleotide
gaaattaatacgactcactatagggatgaataaggagtagttaggagcaagagttttagagctatgctgttttg

SEQ ID NO: 3210 - DNA, 74 bp, Artificial Sequence
  Description of Artificial Sequence: Synthetic oligonucleotide
gaaattaatacgactcactatagggatgaataatgcaagtactaggagggaggttttagagctatgctgttttg

SEQ ID NO: 3211 - DNA, 74 bp, Artificial Sequence
  Description of Artificial Sequence: Synthetic oligonucleotide
gaaattaatacgactcactatagggatgaataacattatctaggagccaggggttttagagctatgctgttttg

SEQ ID NO: 3212 - DNA, 74 bp, Artificial Sequence
  Description of Artificial Sequence: Synthetic oligonucleotide
gaaattaatacgactcactatagggatgaatatagagttgggatattcagaggttttagagctatgctgttttg

SEQ ID NO: 3213 - DNA, 74 bp, Artificial Sequence
  Description of Artificial Sequence: Synthetic oligonucleotide
gaaattaatacgactcactatagggatgaataacatgtttattgtcttctaggttttagagctatgctgttttg

SEQ ID NO: 3214 - DNA, 74 bp, Artificial Sequence
  Description of Artificial Sequence: Synthetic oligonucleotide
gaaattaatacgactcactatagggatgaatatcacatagaagtaaatctgggttttagagctatgctgttttg

SEQ ID NO: 3215 - DNA, 74 bp, Artificial Sequence
  Description of Artificial Sequence: Synthetic oligonucleotide
gaaattaatacgactcactatagggatgaatatagagattttgatgagaggagttttagagctatgctgttttg

SEQ ID NO: 3216 - DNA, 74 bp, Artificial Sequence
  Description of Artificial Sequence: Synthetic oligonucleotide
gaaattaatacgactcactatagggatgaataggttctaagttctcgagcaggttttagagctatgctgttttg

SEQ ID NO: 3217 - DNA, 74 bp, Artificial Sequence
  Description of Artificial Sequence: Synthetic oligonucleotide
gaaattaatacgactcactatagggatgaataattgtgcttaagaacaaagggttttagagctatgctgttttg

SEQ ID NO: 3218 - DNA, 74 bp, Artificial Sequence
  Description of Artificial Sequence: Synthetic oligonucleotide
gaaattaatacgactcactatagggatgaataaaaagcaagcccagagaacagttttagagctatgctgttttg

SEQ ID NO: 3219 - DNA, 74 bp, Artificial Sequence
  Description of Artificial Sequence: Synthetic oligonucleotide
gaaattaatacgactcactatagggatgaataccttatgtgagattgggaaggttttagagctatgctgttttg

SEQ ID NO: 3220 - DNA, 74 bp, Artificial Sequence
  Description of Artificial Sequence: Synthetic oligonucleotide
gaaattaatacgactcactatagggatgaataaggaggtgtgtctggcagacgttttagagctatgctgttttg

SEQ ID NO: 3221 - DNA, 74 bp, Artificial Sequence
  Description of Artificial Sequence: Synthetic oligonucleotide
gaaattaatacgactcactatagggatgaataggagctttgtgagttaacaagttttagagctatgctgttttg

SEQ ID NO: 3222 - DNA, 74 bp, Artificial Sequence
  Description of Artificial Sequence: Synthetic oligonucleotide
gaaattaatacgactcactatagggatgaatagcatctttgcagagaactgagttttagagctatgctgttttg

SEQ ID NO: 3223 - DNA, 74 bp, Artificial Sequence
  Description of Artificial Sequence: Synthetic oligonucleotide
gaaattaatacgactcactatagggatgaatacctctgaagaaaaccgctgggttttagagctatgctgttttg

SEQ ID NO: 3224 - DNA, 74 bp, Artificial Sequence
  Description of Artificial Sequence: Synthetic oligonucleotide
gaaattaatacgactcactatagggatgaatacctctggtttgactggccaggttttagagctatgctgttttg

SEQ ID NO: 3225 - DNA, 74 bp, Artificial Sequence
  Description of Artificial Sequence: Synthetic oligonucleotide
gaaattaatacgactcactatagggatgaatattgtccccacccccacctccgttttagagctatgctgttttg

SEQ ID NO: 3226 - DNA, 74 bp, Artificial Sequence
  Description of Artificial Sequence: Synthetic oligonucleotide
gaaattaatacgactcactatagggatgaatagtgagcatgtgtagtcaggcgttttagagctatgctgttttg

SEQ ID NO: 3227 - DNA, 74 bp, Artificial Sequence
  Description of Artificial Sequence: Synthetic oligonucleotide
gaaattaatacgactcactatagggatgaatagatccagtttataacggggcgttttagagctatgctgttttg

SEQ ID NO: 3228 - DNA, 74 bp, Artificial Sequence
  Description of Artificial Sequence: Synthetic oligonucleotide
gaaattaatacgactcactatagggatgaatatcatttttgtccttctgtgagttttagagctatgctgttttg

SEQ ID NO: 3229 - DNA, 74 bp, Artificial Sequence
  Description of Artificial Sequence: Synthetic oligonucleotide
gaaattaatacgactcactatagggatgaatatgtccatgggaggtaggagggttttagagctatgctgttttg

SEQ ID NO: 3230 - DNA, 74 bp, Artificial Sequence
  Description of Artificial Sequence: Synthetic oligonucleotide
gaaattaatacgactcactatagggatgaatactttctggggagtttggggcgttttagagctatgctgttttg

SEQ ID NO: 3231 - DNA, 74 bp, Artificial Sequence
  Description of Artificial Sequence: Synthetic oligonucleotide
gaaattaatacgactcactatagggatgaatacctgacccttttcctcatccgttttagagctatgctgttttg

SEQ ID NO: 3232 - DNA, 74 bp, Artificial Sequence
  Description of Artificial Sequence: Synthetic oligonucleotide
gaaattaatacgactcactatagggatgaataaatgggagaaactcccaggcgttttagagctatgctgttttg

SEQ ID NO: 3233 - DNA, 74 bp, Artificial Sequence
  Description of Artificial Sequence: Synthetic oligonucleotide
gaaattaatacgactcactatagggatgaatatttctgtctctgggaaaggagttttagagctatgctgttttg

SEQ ID NO: 3234 - DNA, 74 bp, Artificial Sequence
  Description of Artificial Sequence: Synthetic oligonucleotide
gaaattaatacgactcactatagggatgaatagcattagattggaagcataggttttagagctatgctgttttg

SEQ ID NO: 3235 - DNA, 74 bp, Artificial Sequence
  Description of Artificial Sequence: Synthetic oligonucleotide
gaaattaatacgactcactatagggatgaatataagtcagcctttcacctacgttttagagctatgctgttttg

SEQ ID NO: 3236 - DNA, 74 bp, Artificial Sequence
  Description of Artificial Sequence: Synthetic oligonucleotide
gaaattaatacgactcactatagggatgaatacggggtgactacacgtggcggttttagagctatgctgttttg

SEQ ID NO: 3237 - DNA, 74 bp, Artificial Sequence
  Description of Artificial Sequence: Synthetic oligonucleotide
gaaattaatacgactcactatagggatgaataggtctcctgggctcggctgcgttttagagctatgctgttttg

SEQ ID NO: 3238 - DNA, 74 bp, Artificial Sequence
  Description of Artificial Sequence: Synthetic oligonucleotide
gaaattaatacgactcactatagggatgaatagcgttccatttggccagtgggttttagagctatgctgttttg

SEQ ID NO: 3239 - DNA, 74 bp, Artificial Sequence
  Description of Artificial Sequence: Synthetic oligonucleotide
gaaattaatacgactcactatagggatgaatacggccggggcggaggcgccggttttagagctatgctgttttg

SEQ ID NO: 3240 - DNA, 74 bp, Artificial Sequence
  Description of Artificial Sequence: Synthetic oligonucleotide
gaaattaatacgactcactatagggatgaatacagagccaggatttgaaccggttttagagctatgctgttttg

SEQ ID NO: 3241 - DNA, 74 bp, Artificial Sequence
  Description of Artificial Sequence: Synthetic oligonucleotide
gaaattaatacgactcactatagggatgaatagagatgggagggggcagtaagttttagagctatgctgttttg

SEQ ID NO: 3242 - DNA, 74 bp, Artificial Sequence
  Description of Artificial Sequence: Synthetic oligonucleotide
gaaattaatacgactcactatagggatgaataggactctatacagtgaagaagttttagagctatgctgttttg

SEQ ID NO: 3243 - DNA, 74 bp, Artificial Sequence
  Description of Artificial Sequence: Synthetic oligonucleotide
gaaattaatacgactcactatagggatgaatagatttcccttaaggttcagagttttagagctatgctgttttg

SEQ ID NO: 3244 - DNA, 74 bp, Artificial Sequence
  Description of Artificial Sequence: Synthetic oligonucleotide
gaaattaatacgactcactatagggatgaataaaacagaaaaaggctaagaagttttagagctatgctgttttg

SEQ ID NO: 3245 - DNA, 74 bp, Artificial Sequence
  Description of Artificial Sequence: Synthetic oligonucleotide
gaaattaatacgactcactatagggatgaatagttgactcgtgaagagcaaggttttagagctatgctgttttg

SEQ ID NO: 3246 - DNA, 74 bp, Artificial Sequence
  Description of Artificial Sequence: Synthetic oligonucleotide
gaaattaatacgactcactatagggatgaataacagaaaggagatgcagagagttttagagctatgctgttttg

SEQ ID NO: 3247 - DNA, 74 bp, Artificial Sequence
  Description of Artificial Sequence: Synthetic oligonucleotide
gaaattaatacgactcactatagggatgaatagggtggttcattggagcaccgttttagagctatgctgttttg

SEQ ID NO: 3248 - DNA, 74 bp, Artificial Sequence
  Description of Artificial Sequence: Synthetic oligonucleotide
gaaattaatacgactcactatagggatgaatatcattcatggtgaggacagggttttagagctatgctgttttg

SEQ ID NO: 3249 - DNA, 74 bp, Artificial Sequence
  Description of Artificial Sequence: Synthetic oligonucleotide
gaaattaatacgactcactatagggatgaataacagttgtgcttgtagaggagttttagagctatgctgttttg

SEQ ID NO: 3250 - DNA, 74 bp, Artificial Sequence
  Description of Artificial Sequence: Synthetic oligonucleotide
gaaattaatacgactcactatagggatgaatagctgggggtttgccttcaccgttttagagctatgctgttttg

SEQ ID NO: 3251 - DNA, 74 bp, Artificial Sequence
  Description of Artificial Sequence: Synthetic oligonucleotide
gaaattaatacgactcactatagggatgaatagagttggcccccacagaaacgttttagagctatgctgttttg

SEQ ID NO: 3252 - DNA, 74 bp, Artificial Sequence
  Description of Artificial Sequence: Synthetic oligonucleotide
gaaattaatacgactcactatagggatgaataggaacagtctcagtagcaccgttttagagctatgctgttttg

SEQ ID NO: 3253 - DNA, 74 bp, Artificial Sequence
  Description of Artificial Sequence: Synthetic oligonucleotide
gaaattaatacgactcactatagggatgaatagcatgtggcctgcgggctgagttttagagctatgctgttttg

SEQ ID NO: 3254 - DNA, 74 bp, Artificial Sequence
  Description of Artificial Sequence: Synthetic oligonucleotide
gaaattaatacgactcactatagggatgaatagatatagatcatgcgggacagttttagagctatgctgttttg

SEQ ID NO: 3255 - DNA, 74 bp, Artificial Sequence
  Description of Artificial Sequence: Synthetic oligonucleotide
gaaattaatacgactcactatagggatgaatatatttcctgtacatatgtgagttttagagctatgctgttttg

SEQ ID NO: 3256 - DNA, 74 bp, Artificial Sequence
  Description of Artificial Sequence: Synthetic oligonucleotide
gaaattaatacgactcactatagggatgaatactgcaagaaaaagtcaaggcgttttagagctatgctgttttg

SEQ ID NO: 3257 - DNA, 74 bp, Artificial Sequence
  Description of Artificial Sequence: Synthetic oligonucleotide
gaaattaatacgactcactatagggatgaatatgtggcataagccagggggagttttagagctatgctgttttg

SEQ ID NO: 3258 - DNA, 74 bp, Artificial Sequence
  Description of Artificial Sequence: Synthetic oligonucleotide
gaaattaatacgactcactatagggatgaataccatggaaaagagaataccagttttagagctatgctgttttg

SEQ ID NO: 3259 - DNA, 74 bp, Artificial Sequence
  Description of Artificial Sequence: Synthetic oligonucleotide
gaaattaatacgactcactatagggatgaatattgctgcacaacattcctaggttttagagctatgctgttttg

SEQ ID NO: 3260 - DNA, 74 bp, Artificial Sequence
  Description of Artificial Sequence: Synthetic oligonucleotide
gaaattaatacgactcactatagggatgaatagtgctaaaacaacaaggagggttttagagctatgctgttttg

SEQ ID NO: 3261 - DNA, 74 bp, Artificial Sequence
  Description of Artificial Sequence: Synthetic oligonucleotide
gaaattaatacgactcactatagggatgaataaggtcaaaacatgcttacaagttttagagctatgctgttttg

SEQ ID NO: 3262 - DNA, 74 bp, Artificial Sequence
  Description of Artificial Sequence: Synthetic oligonucleotide
gaaattaatacgactcactatagggatgaataattaggcatggtagaaagaggttttagagctatgctgttttg

SEQ ID NO: 3263 - DNA, 74 bp, Artificial Sequence
  Description of Artificial Sequence: Synthetic oligonucleotide
gaaattaatacgactcactatagggatgaatagatttttgagaaatgaagaggttttagagctatgctgttttg

SEQ ID NO: 3264 - DNA, 74 bp, Artificial Sequence
  Description of Artificial Sequence: Synthetic oligonucleotide
gaaattaatacgactcactatagggatgaatacagaggagactgtgaagaaggttttagagctatgctgttttg

SEQ ID NO: 3265 - DNA, 74 bp, Artificial Sequence
  Description of Artificial Sequence: Synthetic oligonucleotide
gaaattaatacgactcactatagggatgaatatctgggtgccgggtggagaagttttagagctatgctgttttg

SEQ ID NO: 3266 - DNA, 74 bp, Artificial Sequence
  Description of Artificial Sequence: Synthetic oligonucleotide
gaaattaatacgactcactatagggatgaatagatgaggttcaaagtccaaagttttagagctatgctgttttg

SEQ ID NO: 3267 - DNA, 74 bp, Artificial Sequence
  Description of Artificial Sequence: Synthetic oligonucleotide
gaaattaatacgactcactatagggatgaataagagagaaaagtttaagtaagttttagagctatgctgttttg

SEQ ID NO: 3268 - DNA, 74 bp, Artificial Sequence
  Description of Artificial Sequence: Synthetic oligonucleotide
gaaattaatacgactcactatagggatgaatattgccctgcagctcctggaagttttagagctatgctgttttg

SEQ ID NO: 3269 - DNA, 74 bp, Artificial Sequence
  Description of Artificial Sequence: Synthetic oligonucleotide
gaaattaatacgactcactatagggatgaatagaaactgtcagcctgccagcgttttagagctatgctgttttg

SEQ ID NO: 3270 - DNA, 74 bp, Artificial Sequence
  Description of Artificial Sequence: Synthetic oligonucleotide
gaaattaatacgactcactatagggatgaatatcaggccctaagataagggagttttagagctatgctgttttg

SEQ ID NO: 3271 - DNA, 74 bp, Artificial Sequence
  Description of Artificial Sequence: Synthetic oligonucleotide
gaaattaatacgactcactatagggatgaatataaaatacttaataaaataagttttagagctatgctgttttg

SEQ ID NO: 3272 - DNA, 74 bp, Artificial Sequence
  Description of Artificial Sequence: Synthetic oligonucleotide
gaaattaatacgactcactatagggatgaataagatgccaagcaggtacggggttttagagctatgctgttttg

SEQ ID NO: 3273 - DNA, 74 bp, Artificial Sequence
  Description of Artificial Sequence: Synthetic oligonucleotide
gaaattaatacgactcactatagggatgaataaaaaattgttatgagcacaggttttagagctatgctgttttg

SEQ ID NO: 3274 - DNA, 74 bp, Artificial Sequence
  Description of Artificial Sequence: Synthetic oligonucleotide
gaaattaatacgactcactatagggatgaataaaatatgttatgaaaggcaagttttagagctatgctgttttg

SEQ ID NO: 3275 - DNA, 74 bp, Artificial Sequence
  Description of Artificial Sequence: Synthetic oligonucleotide
gaaattaatacgactcactatagggatgaataaagtcagcagggtcaaatcagttttagagctatgctgttttg

SEQ ID NO: 3276 - DNA, 74 bp, Artificial Sequence
  Description of Artificial Sequence: Synthetic oligonucleotide
gaaattaatacgactcactatagggatgaatagaaagcaagaatgtttgcaagttttagagctatgctgttttg

SEQ ID NO: 3277 - DNA, 74 bp, Artificial Sequence
  Description of Artificial Sequence: Synthetic oligonucleotide
gaaattaatacgactcactatagggatgaataaggatttctcctggcaatgagttttagagctatgctgttttg

SEQ ID NO: 3278 - DNA, 74 bp, Artificial Sequence
  Description of Artificial Sequence: Synthetic oligonucleotide
gaaattaatacgactcactatagggatgaatagaaagagtgatgggagatgagttttagagctatgctgttttg

SEQ ID NO: 3279 - DNA, 74 bp, Artificial Sequence
  Description of Artificial Sequence: Synthetic oligonucleotide
gaaattaatacgactcactatagggatgaatatgagagaggagactcaggaagttttagagctatgctgttttg

SEQ ID NO: 3280 - DNA, 74 bp, Artificial Sequence
  Description of Artificial Sequence: Synthetic oligonucleotide
gaaattaatacgactcactatagggatgaatatttcctgtaggagtcaaggcgttttagagctatgctgttttg

SEQ ID NO: 3281 - DNA, 74 bp, Artificial Sequence
  Description of Artificial Sequence: Synthetic oligonucleotide
gaaattaatacgactcactatagggatgaatagatatggccttatcctctgggttttagagctatgctgttttg

SEQ ID NO: 3282 - DNA, 74 bp, Artificial Sequence
  Description of Artificial Sequence: Synthetic oligonucleotide
gaaattaatacgactcactatagggatgaatatagacctgctctggatgtgggttttagagctatgctgttttg

SEQ ID NO: 3283 - DNA, 74 bp, Artificial Sequence
  Description of Artificial Sequence: Synthetic oligonucleotide
gaaattaatacgactcactatagggatgaatatcagcgaaccttgggtaaaagttttagagctatgctgttttg

SEQ ID NO: 3284 - DNA, 74 bp, Artificial Sequence
  Description of Artificial Sequence: Synthetic oligonucleotide
gaaattaatacgactcactatagggatgaatagcataagagtaccaaacacagttttagagctatgctgttttg

SEQ ID NO: 3285 - DNA, 74 bp, Artificial Sequence
  Description of Artificial Sequence: Synthetic oligonucleotide
gaaattaatacgactcactatagggatgaatattatgtttccataaagacaagttttagagctatgctgttttg

SEQ ID NO: 3286 - DNA, 74 bp, Artificial Sequence
  Description of Artificial Sequence: Synthetic oligonucleotide
gaaattaatacgactcactatagggatgaatactgtgccgttatttcagtgggttttagagctatgctgttttg

SEQ ID NO: 3287 - DNA, 74 bp, Artificial Sequence
  Description of Artificial Sequence: Synthetic oligonucleotide
gaaattaatacgactcactatagggatgaatattttgaggttactcctgccagttttagagctatgctgttttg

SEQ ID NO: 3288 - DNA, 74 bp, Artificial Sequence
  Description of Artificial Sequence: Synthetic oligonucleotide
gaaattaatacgactcactatagggatgaatatcttgtaatttgttagaagggttttagagctatgctgttttg

SEQ ID NO: 3289 - DNA, 74 bp, Artificial Sequence
  Description of Artificial Sequence: Synthetic oligonucleotide
gaaattaatacgactcactatagggatgaataagagatctctacatcaaaaagttttagagctatgctgttttg

SEQ ID NO: 3290 - DNA, 74 bp, Artificial Sequence
  Description of Artificial Sequence: Synthetic oligonucleotide
gaaattaatacgactcactatagggatgaatactaccgcaaagagatcgaaggttttagagctatgctgttttg

SEQ ID NO: 3291 - DNA, 74 bp, Artificial Sequence
  Description of Artificial Sequence: Synthetic oligonucleotide
gaaattaatacgactcactatagggatgaataagtggtgttagggagtggaggttttagagctatgctgttttg

SEQ ID NO: 3292 - DNA, 74 bp, Artificial Sequence
  Description of Artificial Sequence: Synthetic oligonucleotide
gaaattaatacgactcactatagggatgaatatagccgcgccacagctagcggttttagagctatgctgttttg

SEQ ID NO: 3293 - DNA, 74 bp, Artificial Sequence
  Description of Artificial Sequence: Synthetic oligonucleotide
gaaattaatacgactcactatagggatgaataccgacgtccgcctcgccgcagttttagagctatgctgttttg

SEQ ID NO: 3294 - DNA, 74 bp, Artificial Sequence
  Description of Artificial Sequence: Synthetic oligonucleotide
gaaattaatacgactcactatagggatgaatagggctgcgcgagcaggaagcgttttagagctatgctgttttg

SEQ ID NO: 3295 - DNA, 74 bp, Artificial Sequence
  Description of Artificial Sequence: Synthetic oligonucleotide
gaaattaatacgactcactatagggatgaataggacgacccccgcgggagccgttttagagctatgctgttttg

SEQ ID NO: 3296 - DNA, 74 bp, Artificial Sequence
  Description of Artificial Sequence: Synthetic oligonucleotide
gaaattaatacgactcactatagggatgaatagaggcggcggccggcgccgcgttttagagctatgctgttttg

SEQ ID NO: 3297 - DNA, 74 bp, Artificial Sequence
  Description of Artificial Sequence: Synthetic oligonucleotide
gaaattaatacgactcactatagggatgaatagagcctccccggcggccggggttttagagctatgctgttttg

SEQ ID NO: 3298 - DNA, 74 bp, Artificial Sequence
  Description of Artificial Sequence: Synthetic oligonucleotide
gaaattaatacgactcactatagggatgaatatggagtccctgcggccgccggttttagagctatgctgttttg

SEQ ID NO: 3299 - DNA, 74 bp, Artificial Sequence
  Description of Artificial Sequence: Synthetic oligonucleotide
gaaattaatacgactcactatagggatgaatattaccttttctgccgtgtaggttttagagctatgctgttttg

SEQ ID NO: 3300 - DNA, 74 bp, Artificial Sequence
  Description of Artificial Sequence: Synthetic oligonucleotide
gaaattaatacgactcactatagggatgaataatttcaaagactacataggagttttagagctatgctgttttg

SEQ ID NO: 3301 - DNA, 74 bp, Artificial Sequence
  Description of Artificial Sequence: Synthetic oligonucleotide
gaaattaatacgactcactatagggatgaataacaaatagaaagctagcaaagttttagagctatgctgttttg

SEQ ID NO: 3302 - DNA, 74 bp, Artificial Sequence
  Description of Artificial Sequence: Synthetic oligonucleotide
gaaattaatacgactcactatagggatgaatatggagtcatttttgctaggcgttttagagctatgctgttttg

SEQ ID NO: 3303 - DNA, 74 bp, Artificial Sequence
  Description of Artificial Sequence: Synthetic oligonucleotide
gaaattaatacgactcactatagggatgaatacttcgctggagagatggcacgttttagagctatgctgttttg

SEQ ID NO: 3304 - DNA, 74 bp, Artificial Sequence
  Description of Artificial Sequence: Synthetic oligonucleotide
gaaattaatacgactcactatagggatgaataagtctggagacagctaggcagttttagagctatgctgttttg

SEQ ID NO: 3305 - DNA, 74 bp, Artificial Sequence
  Description of Artificial Sequence: Synthetic oligonucleotide
gaaattaatacgactcactatagggatgaatattgccacgattgctcaacacgttttagagctatgctgttttg

SEQ ID NO: 3306 - DNA, 74 bp, Artificial Sequence
  Description of Artificial Sequence: Synthetic oligonucleotide
gaaattaatacgactcactatagggatgaatacaaaagagaagggaagagccgttttagagctatgctgttttg

SEQ ID NO: 3307 - DNA, 74 bp, Artificial Sequence
  Description of Artificial Sequence: Synthetic oligonucleotide
gaaattaatacgactcactatagggatgaatagtaggagctagaaagaatccgttttagagctatgctgttttg

SEQ ID NO: 3308 - DNA, 74 bp, Artificial Sequence
  Description of Artificial Sequence: Synthetic oligonucleotide
gaaattaatacgactcactatagggatgaatatggcttcctacagcctccaggttttagagctatgctgttttg

SEQ ID NO: 3309 - DNA, 74 bp, Artificial Sequence
  Description of Artificial Sequence: Synthetic oligonucleotide
gaaattaatacgactcactatagggatgaatagcacagccaatggttgaaccgttttagagctatgctgttttg

SEQ ID NO: 3310 - DNA, 74 bp, Artificial Sequence
  Description of Artificial Sequence: Synthetic oligonucleotide
gaaattaatacgactcactatagggatgaatactgacgttgtcatggcaacagttttagagctatgctgttttg

SEQ ID NO: 3311 - DNA, 74 bp, Artificial Sequence
  Description of Artificial Sequence: Synthetic oligonucleotide
gaaattaatacgactcactatagggatgaataattcaatgctaaaggtcaaagttttagagctatgctgttttg

SEQ ID NO: 3312 - DNA, 74 bp, Artificial Sequence
  Description of Artificial Sequence: Synthetic oligonucleotide
gaaattaatacgactcactatagggatgaatatgttcatttctgaggagagggttttagagctatgctgttttg

SEQ ID NO: 3313 - DNA, 74 bp, Artificial Sequence
  Description of Artificial Sequence: Synthetic oligonucleotide
gaaattaatacgactcactatagggatgaatagggagggagggagggagggagttttagagctatgctgttttg

SEQ ID NO: 3314 - DNA, 74 bp, Artificial Sequence
  Description of Artificial Sequence: Synthetic oligonucleotide
gaaattaatacgactcactatagggatgaatatttttaagactgcagaaggggttttagagctatgctgttttg

SEQ ID NO: 3315 - DNA, 74 bp, Artificial Sequence
  Description of Artificial Sequence: Synthetic oligonucleotide
gaaattaatacgactcactatagggatgaataggttggattgtatggcataagttttagagctatgctgttttg

SEQ ID NO: 3316 - DNA, 74 bp, Artificial Sequence
  Description of Artificial Sequence: Synthetic oligonucleotide
gaaattaatacgactcactatagggatgaatagatttttggggtgggggtgggttttagagctatgctgttttg

SEQ ID NO: 3317 - DNA, 74 bp, Artificial Sequence
  Description of Artificial Sequence: Synthetic oligonucleotide
gaaattaatacgactcactatagggatgaataggaaaatagacataataaaggttttagagctatgctgttttg

SEQ ID NO: 3318 - DNA, 74 bp, Artificial Sequence
  Description of Artificial Sequence: Synthetic oligonucleotide
gaaattaatacgactcactatagggatgaatagatcagtaataagaataagagttttagagctatgctgttttg

SEQ ID NO: 3319 - DNA, 74 bp, Artificial Sequence
  Description of Artificial Sequence: Synthetic oligonucleotide
gaaattaatacgactcactatagggatgaataccatggatgatttagaaggggttttagagctatgctgttttg

SEQ ID NO: 3320 - DNA, 74 bp, Artificial Sequence
  Description of Artificial Sequence: Synthetic oligonucleotide
gaaattaatacgactcactatagggatgaataagagtgagggaaaaaaggaagttttagagctatgctgttttg

SEQ ID NO: 3321 - DNA, 74 bp, Artificial Sequence
  Description of Artificial Sequence: Synthetic oligonucleotide
gaaattaatacgactcactatagggatgaataatagctggcccacagtaaaagttttagagctatgctgttttg

SEQ ID NO: 3322 - DNA, 74 bp, Artificial Sequence
  Description of Artificial Sequence: Synthetic oligonucleotide
gaaattaatacgactcactatagggatgaataattctccaaaatgagaatgggttttagagctatgctgttttg

SEQ ID NO: 3323 - DNA, 74 bp, Artificial Sequence
  Description of Artificial Sequence: Synthetic oligonucleotide
gaaattaatacgactcactatagggatgaatatattgcaaaactcattccaggttttagagctatgctgttttg

SEQ ID NO: 3324 - DNA, 74 bp, Artificial Sequence
  Description of Artificial Sequence: Synthetic oligonucleotide
gaaattaatacgactcactatagggatgaataatttctgcatagtcttcaccgttttagagctatgctgttttg

SEQ ID NO: 3325 - DNA, 74 bp, Artificial Sequence
  Description of Artificial Sequence: Synthetic oligonucleotide
gaaattaatacgactcactatagggatgaataataggtaatcccataaatccgttttagagctatgctgttttg

SEQ ID NO: 3326 - DNA, 74 bp, Artificial Sequence
  Description of Artificial Sequence: Synthetic oligonucleotide
gaaattaatacgactcactatagggatgaatatcacctctctcatatgccaggttttagagctatgctgttttg

SEQ ID NO: 3327 - DNA, 74 bp, Artificial Sequence
  Description of Artificial Sequence: Synthetic oligonucleotide
gaaattaatacgactcactatagggatgaatatcacctgtggccagacgcaggttttagagctatgctgttttg

SEQ ID NO: 3328 - DNA, 74 bp, Artificial Sequence
  Description of Artificial Sequence: Synthetic oligonucleotide
gaaattaatacgactcactatagggatgaataaggctgggatccctggcagcgttttagagctatgctgttttg

SEQ ID NO: 3329 - DNA, 74 bp, Artificial Sequence
  Description of Artificial Sequence: Synthetic oligonucleotide
gaaattaatacgactcactatagggatgaatatgtaaaatgaggatgcagacgttttagagctatgctgttttg

SEQ ID NO: 3330 - DNA, 74 bp, Artificial Sequence
  Description of Artificial Sequence: Synthetic oligonucleotide
gaaattaatacgactcactatagggatgaatagaatcttggcctgctggcaagttttagagctatgctgttttg

SEQ ID NO: 3331 - DNA, 74 bp, Artificial Sequence
  Description of Artificial Sequence: Synthetic oligonucleotide
gaaattaatacgactcactatagggatgaatatgtccttcactcataacacagttttagagctatgctgttttg

SEQ ID NO: 3332 - DNA, 74 bp, Artificial Sequence
  Description of Artificial Sequence: Synthetic oligonucleotide
gaaattaatacgactcactatagggatgaataggtgatgatggcactacaaagttttagagctatgctgttttg

SEQ ID NO: 3333 - DNA, 74 bp, Artificial Sequence
  Description of Artificial Sequence: Synthetic oligonucleotide
gaaattaatacgactcactatagggatgaatacttgttccctgtagtccagggttttagagctatgctgttttg

SEQ ID NO: 3334 - DNA, 74 bp, Artificial Sequence
  Description of Artificial Sequence: Synthetic oligonucleotide
gaaattaatacgactcactatagggatgaatactgagataaagcttaagcccgttttagagctatgctgttttg

SEQ ID NO: 3335 - DNA, 74 bp, Artificial Sequence
  Description of Artificial Sequence: Synthetic oligonucleotide
gaaattaatacgactcactatagggatgaataggacccctgtcataaaagacgttttagagctatgctgttttg

SEQ ID NO: 3336 - DNA, 74 bp, Artificial Sequence
  Description of Artificial Sequence: Synthetic oligonucleotide
gaaattaatacgactcactatagggatgaatagggagggggggttggggggagttttagagctatgctgttttg

SEQ ID NO: 3337 - DNA, 74 bp, Artificial Sequence
  Description of Artificial Sequence: Synthetic oligonucleotide
gaaattaatacgactcactatagggatgaataaagtgtcttccacaaaaccggttttagagctatgctgttttg

SEQ ID NO: 3338 - DNA, 74 bp, Artificial Sequence
  Description of Artificial Sequence: Synthetic oligonucleotide
gaaattaatacgactcactatagggatgaatatgacatggtctctccagcaggttttagagctatgctgttttg

SEQ ID NO: 3339 - DNA, 74 bp, Artificial Sequence
  Description of Artificial Sequence: Synthetic oligonucleotide
gaaattaatacgactcactatagggatgaatagagtcatccagaggctcaacgttttagagctatgctgttttg

SEQ ID NO: 3340 - DNA, 74 bp, Artificial Sequence
  Description of Artificial Sequence: Synthetic oligonucleotide
gaaattaatacgactcactatagggatgaataaggtttctgacaagtaaagcgttttagagctatgctgttttg

SEQ ID NO: 3341 - DNA, 74 bp, Artificial Sequence
  Description of Artificial Sequence: Synthetic oligonucleotide
gaaattaatacgactcactatagggatgaatataatatgggcaccagtcaccgttttagagctatgctgttttg

SEQ ID NO: 3342 - DNA, 74 bp, Artificial Sequence
  Description of Artificial Sequence: Synthetic oligonucleotide
gaaattaatacgactcactatagggatgaataaaaacagggaagtcagcaaagttttagagctatgctgttttg

SEQ ID NO: 3343 - DNA, 74 bp, Artificial Sequence
  Description of Artificial Sequence: Synthetic oligonucleotide
gaaattaatacgactcactatagggatgaatacagctccagacccaaagagagttttagagctatgctgttttg

SEQ ID NO: 3344 - DNA, 74 bp, Artificial Sequence
  Description of Artificial Sequence: Synthetic oligonucleotide
gaaattaatacgactcactatagggatgaatatagtgtggctggtacactaggttttagagctatgctgttttg

SEQ ID NO: 3345 - DNA, 74 bp, Artificial Sequence
  Description of Artificial Sequence: Synthetic oligonucleotide
gaaattaatacgactcactatagggatgaatagtttgccagatggagaaggagttttagagctatgctgttttg

SEQ ID NO: 3346 - DNA, 74 bp, Artificial Sequence
  Description of Artificial Sequence: Synthetic oligonucleotide
gaaattaatacgactcactatagggatgaataatgaggaaagaaacaaaggggttttagagctatgctgttttg

SEQ ID NO: 3347 - DNA, 74 bp, Artificial Sequence
  Description of Artificial Sequence: Synthetic oligonucleotide
gaaattaatacgactcactatagggatgaatagatggtaagagtccctgtgggttttagagctatgctgttttg

SEQ ID NO: 3348 - DNA, 74 bp, Artificial Sequence
  Description of Artificial Sequence: Synthetic oligonucleotide
gaaattaatacgactcactatagggatgaatatctcaagtatgtggttggaggttttagagctatgctgttttg

SEQ ID NO: 3349 - DNA, 74 bp, Artificial Sequence
  Description of Artificial Sequence: Synthetic oligonucleotide
gaaattaatacgactcactatagggatgaataaaacaagacagaatagggaggttttagagctatgctgttttg

SEQ ID NO: 3350 - DNA, 74 bp, Artificial Sequence
  Description of Artificial Sequence: Synthetic oligonucleotide
gaaattaatacgactcactatagggatgaatacgagaccagcttggccaacagttttagagctatgctgttttg

SEQ ID NO: 3351 - DNA, 74 bp, Artificial Sequence
  Description of Artificial Sequence: Synthetic oligonucleotide
gaaattaatacgactcactatagggatgaatagataaacaaaacaaaactaagttttagagctatgctgttttg

SEQ ID NO: 3352 - DNA, 74 bp, Artificial Sequence
  Description of Artificial Sequence: Synthetic oligonucleotide
gaaattaatacgactcactatagggatgaatacatgtctgggccgggcaagggttttagagctatgctgttttg

SEQ ID NO: 3353 - DNA, 74 bp, Artificial Sequence
  Description of Artificial Sequence: Synthetic oligonucleotide
gaaattaatacgactcactatagggatgaatacttggagagtggcatgggacgttttagagctatgctgttttg

SEQ ID NO: 3354 - DNA, 74 bp, Artificial Sequence
  Description of Artificial Sequence: Synthetic oligonucleotide
gaaattaatacgactcactatagggatgaatagcaatgcacaggaagagcaagttttagagctatgctgttttg

SEQ ID NO: 3355 - DNA, 74 bp, Artificial Sequence
  Description of Artificial Sequence: Synthetic oligonucleotide
gaaattaatacgactcactatagggatgaatatttggggctttggagggtaggttttagagctatgctgttttg

SEQ ID NO: 3356 - DNA, 74 bp, Artificial Sequence
  Description of Artificial Sequence: Synthetic oligonucleotide
gaaattaatacgactcactatagggatgaatagaaagccaagactgagcccagttttagagctatgctgttttg

SEQ ID NO: 3357 - DNA, 74 bp, Artificial Sequence
  Description of Artificial Sequence: Synthetic oligonucleotide
gaaattaatacgactcactatagggatgaataataaagctgttaaaatgtgagttttagagctatgctgttttg

SEQ ID NO: 3358 - DNA, 74 bp, Artificial Sequence
  Description of Artificial Sequence: Synthetic oligonucleotide
gaaattaatacgactcactatagggatgaatatagtgccagtctgcttccaggttttagagctatgctgttttg

SEQ ID NO: 3359 - DNA, 74 bp, Artificial Sequence
  Description of Artificial Sequence: Synthetic oligonucleotide
gaaattaatacgactcactatagggatgaatatggaaacactaaagagctccgttttagagctatgctgttttg

SEQ ID NO: 3360 - DNA, 74 bp, Artificial Sequence
  Description of Artificial Sequence: Synthetic oligonucleotide
gaaattaatacgactcactatagggatgaatattatatcttgtatactcagggttttagagctatgctgttttg

SEQ ID NO: 3361 - DNA, 74 bp, Artificial Sequence
  Description of Artificial Sequence: Synthetic oligonucleotide
gaaattaatacgactcactatagggatgaatatatcagataatgatccacacgttttagagctatgctgttttg

SEQ ID NO: 3362 - DNA, 74 bp, Artificial Sequence
  Description of Artificial Sequence: Synthetic oligonucleotide
gaaattaatacgactcactatagggatgaatataagagagattgtagcctaggttttagagctatgctgttttg

SEQ ID NO: 3363 - DNA, 74 bp, Artificial Sequence
  Description of Artificial Sequence: Synthetic oligonucleotide
gaaattaatacgactcactatagggatgaatagagtccagtgatacacaaaagttttagagctatgctgttttg

SEQ ID NO: 3364 - DNA, 74 bp, Artificial Sequence
  Description of Artificial Sequence: Synthetic oligonucleotide
gaaattaatacgactcactatagggatgaatatattccagtccaacatcacagttttagagctatgctgttttg

SEQ ID NO: 3365 - DNA, 74 bp, Artificial Sequence
  Description of Artificial Sequence: Synthetic oligonucleotide
gaaattaatacgactcactatagggatgaatatggggactgttgtggggtgggttttagagctatgctgttttg

SEQ ID NO: 3366 - DNA, 74 bp, Artificial Sequence
  Description of Artificial Sequence: Synthetic oligonucleotide
gaaattaatacgactcactatagggatgaatatcgaggaatttaagacagccgttttagagctatgctgttttg

SEQ ID NO: 3367 - DNA, 74 bp, Artificial Sequence
  Description of Artificial Sequence: Synthetic oligonucleotide
gaaattaatacgactcactatagggatgaatacagccaagaggcacccatgagttttagagctatgctgttttg

SEQ ID NO: 3368 - DNA, 74 bp, Artificial Sequence
  Description of Artificial Sequence: Synthetic oligonucleotide
gaaattaatacgactcactatagggatgaataaatctgcccccactccatcagttttagagctatgctgttttg

SEQ ID NO: 3369 - DNA, 74 bp, Artificial Sequence
  Description of Artificial Sequence: Synthetic oligonucleotide
gaaattaatacgactcactatagggatgaatacttctctgctcctagcaccagttttagagctatgctgttttg

SEQ ID NO: 3370 - DNA, 74 bp, Artificial Sequence
  Description of Artificial Sequence: Synthetic oligonucleotide
gaaattaatacgactcactatagggatgaataaggtgagatggaataagggcgttttagagctatgctgttttg

SEQ ID NO: 3371 - DNA, 74 bp, Artificial Sequence
  Description of Artificial Sequence: Synthetic oligonucleotide
gaaattaatacgactcactatagggatgaatatagggataatcagtagagaggttttagagctatgctgttttg

SEQ ID NO: 3372 - DNA, 74 bp, Artificial Sequence
  Description of Artificial Sequence: Synthetic oligonucleotide
gaaattaatacgactcactatagggatgaataagacagtacgcaccctgcccgttttagagctatgctgttttg

SEQ ID NO: 3373 - DNA, 74 bp, Artificial Sequence
  Description of Artificial Sequence: Synthetic oligonucleotide
gaaattaatacgactcactatagggatgaataagaaagcaccgatggcaaaggttttagagctatgctgttttg

SEQ ID NO: 3374 - DNA, 74 bp, Artificial Sequence
  Description of Artificial Sequence: Synthetic oligonucleotide
gaaattaatacgactcactatagggatgaatatggcttgcagcggcgccgaagttttagagctatgctgttttg

SEQ ID NO: 3375 - DNA, 74 bp, Artificial Sequence
  Description of Artificial Sequence: Synthetic oligonucleotide
gaaattaatacgactcactatagggatgaataggtggcgtctcgcctcaccggttttagagctatgctgttttg

SEQ ID NO: 3376 - DNA, 74 bp, Artificial Sequence
  Description of Artificial Sequence: Synthetic oligonucleotide
gaaattaatacgactcactatagggatgaatagggccccctccctcgcgcaggttttagagctatgctgttttg

SEQ ID NO: 3377 - DNA, 74 bp, Artificial Sequence
  Description of Artificial Sequence: Synthetic oligonucleotide
gaaattaatacgactcactatagggatgaatacatcctcgttgagcgaagcagttttagagctatgctgttttg

SEQ ID NO: 3378 - DNA, 74 bp, Artificial Sequence
  Description of Artificial Sequence: Synthetic oligonucleotide
gaaattaatacgactcactatagggatgaatattggacagaagaaccacagcgttttagagctatgctgttttg

SEQ ID NO: 3379 - DNA, 74 bp, Artificial Sequence
  Description of Artificial Sequence: Synthetic oligonucleotide
gaaattaatacgactcactatagggatgaatattaaaactgtcttaagatgagttttagagctatgctgttttg

SEQ ID NO: 3380 - DNA, 74 bp, Artificial Sequence
  Description of Artificial Sequence: Synthetic oligonucleotide
gaaattaatacgactcactatagggatgaataaggctttacaaaattccagggttttagagctatgctgttttg

SEQ ID NO: 3381 - DNA, 74 bp, Artificial Sequence
  Description of Artificial Sequence: Synthetic oligonucleotide
gaaattaatacgactcactatagggatgaatataagtcgcaggaagggatgcgttttagagctatgctgttttg

SEQ ID NO: 3382 - DNA, 74 bp, Artificial Sequence
  Description of Artificial Sequence: Synthetic oligonucleotide
gaaattaatacgactcactatagggatgaatagtggcactatccacaaagaggttttagagctatgctgttttg

SEQ ID NO: 3383 - DNA, 74 bp, Artificial Sequence
  Description of Artificial Sequence: Synthetic oligonucleotide
gaaattaatacgactcactatagggatgaatatgttctgctacattatgtaggttttagagctatgctgttttg

SEQ ID NO: 3384 - DNA, 74 bp, Artificial Sequence
  Description of Artificial Sequence: Synthetic oligonucleotide
gaaattaatacgactcactatagggatgaatacaggcgtgaaccacagcaccgttttagagctatgctgttttg

SEQ ID NO: 3385 - DNA, 74 bp, Artificial Sequence
  Description of Artificial Sequence: Synthetic oligonucleotide
gaaattaatacgactcactatagggatgaataatggcatgatgtttcaaggggttttagagctatgctgttttg

SEQ ID NO: 3386 - DNA, 74 bp, Artificial Sequence
  Description of Artificial Sequence: Synthetic oligonucleotide
gaaattaatacgactcactatagggatgaatacaaatgcaagggtcaaaagagttttagagctatgctgttttg

SEQ ID NO: 3387 - DNA, 74 bp, Artificial Sequence
  Description of Artificial Sequence: Synthetic oligonucleotide
gaaattaatacgactcactatagggatgaatacctacctcatagaggtaagggttttagagctatgctgttttg

SEQ ID NO: 3388 - DNA, 74 bp, Artificial Sequence
  Description of Artificial Sequence: Synthetic oligonucleotide
gaaattaatacgactcactatagggatgaatagggcacagctcttcacagcagttttagagctatgctgttttg

SEQ ID NO: 3389 - DNA, 74 bp, Artificial Sequence
  Description of Artificial Sequence: Synthetic oligonucleotide
gaaattaatacgactcactatagggatgaatatctatcatatgaatctggacgttttagagctatgctgttttg

SEQ ID NO: 3390 - DNA, 74 bp, Artificial Sequence
  Description of Artificial Sequence: Synthetic oligonucleotide
gaaattaatacgactcactatagggatgaatactacaggtggggaaaggacagttttagagctatgctgttttg

SEQ ID NO: 3391 - DNA, 74 bp, Artificial Sequence
  Description of Artificial Sequence: Synthetic oligonucleotide
gaaattaatacgactcactatagggatgaatacggttctctttttcaagaacgttttagagctatgctgttttg

SEQ ID NO: 3392 - DNA, 74 bp, Artificial Sequence
  Description of Artificial Sequence: Synthetic oligonucleotide
gaaattaatacgactcactatagggatgaatatggctggggcaaaggagaaagttttagagctatgctgttttg

SEQ ID NO: 3393 - DNA, 74 bp, Artificial Sequence
  Description of Artificial Sequence: Synthetic oligonucleotide
gaaattaatacgactcactatagggatgaatatagtaaaacttacctcacgcgttttagagctatgctgttttg

SEQ ID NO: 3394 - DNA, 74 bp, Artificial Sequence
  Description of Artificial Sequence: Synthetic oligonucleotide
gaaattaatacgactcactatagggatgaataaagctgatatcttgagaaaagttttagagctatgctgttttg

SEQ ID NO: 3395 - DNA, 74 bp, Artificial Sequence
  Description of Artificial Sequence: Synthetic oligonucleotide
gaaattaatacgactcactatagggatgaatagaagcaccaaagtagactacgttttagagctatgctgttttg

SEQ ID NO: 3396 - DNA, 74 bp, Artificial Sequence
  Description of Artificial Sequence: Synthetic oligonucleotide
gaaattaatacgactcactatagggatgaataattgcaacatgaagctccaggttttagagctatgctgttttg

SEQ ID NO: 3397 - DNA, 74 bp, Artificial Sequence
  Description of Artificial Sequence: Synthetic oligonucleotide
gaaattaatacgactcactatagggatgaataaagcaaagggcaggcaaaaggttttagagctatgctgttttg

SEQ ID NO: 3398 - DNA, 74 bp, Artificial Sequence
  Description of Artificial Sequence: Synthetic oligonucleotide
gaaattaatacgactcactatagggatgaatatttagtcaccatagagacaagttttagagctatgctgttttg

SEQ ID NO: 3399 - DNA, 74 bp, Artificial Sequence
  Description of Artificial Sequence: Synthetic oligonucleotide
gaaattaatacgactcactatagggatgaataaaacttgctgataacaggccgttttagagctatgctgttttg

SEQ ID NO: 3400 - DNA, 74 bp, Artificial Sequence
  Description of Artificial Sequence: Synthetic oligonucleotide
gaaattaatacgactcactatagggatgaataaaattaagatgggtaaatgggttttagagctatgctgttttg

SEQ ID NO: 3401 - DNA, 74 bp, Artificial Sequence
  Description of Artificial Sequence: Synthetic oligonucleotide
gaaattaatacgactcactatagggatgaataaaatatcatttaattaaggggttttagagctatgctgttttg

SEQ ID NO: 3402 - DNA, 74 bp, Artificial Sequence
  Description of Artificial Sequence: Synthetic oligonucleotide
gaaattaatacgactcactatagggatgaatataacttcggacttcagaaaagttttagagctatgctgttttg

SEQ ID NO: 3403 - DNA, 74 bp, Artificial Sequence
  Description of Artificial Sequence: Synthetic oligonucleotide
gaaattaatacgactcactatagggatgaatatcacataactaattgaagccgttttagagctatgctgttttg

SEQ ID NO: 3404 - DNA, 74 bp, Artificial Sequence
  Description of Artificial Sequence: Synthetic oligonucleotide
gaaattaatacgactcactatagggatgaatattgttttttcctaaaagtaggttttagagctatgctgttttg

SEQ ID NO: 3405 - DNA, 74 bp, Artificial Sequence
  Description of Artificial Sequence: Synthetic oligonucleotide
gaaattaatacgactcactatagggatgaataatgaaaggtggcttctcagcgttttagagctatgctgttttg

SEQ ID NO: 3406 - DNA, 74 bp, Artificial Sequence
  Description of Artificial Sequence: Synthetic oligonucleotide
gaaattaatacgactcactatagggatgaataaatgcccaaggtcccagggggttttagagctatgctgttttg

SEQ ID NO: 3407 - DNA, 74 bp, Artificial Sequence
  Description of Artificial Sequence: Synthetic oligonucleotide
gaaattaatacgactcactatagggatgaatactgaataaatgccaaggacagttttagagctatgctgttttg

SEQ ID NO: 3408 - DNA, 74 bp, Artificial Sequence
  Description of Artificial Sequence: Synthetic oligonucleotide
gaaattaatacgactcactatagggatgaataatgaacagatgatggagaccgttttagagctatgctgttttg

SEQ ID NO: 3409 - DNA, 74 bp, Artificial Sequence
  Description of Artificial Sequence: Synthetic oligonucleotide
gaaattaatacgactcactatagggatgaatagagcccagctgcaaggaccagttttagagctatgctgttttg

SEQ ID NO: 3410 - DNA, 74 bp, Artificial Sequence
  Description of Artificial Sequence: Synthetic oligonucleotide
gaaattaatacgactcactatagggatgaataatttgcaacatttagagcaggttttagagctatgctgttttg

SEQ ID NO: 3411 - DNA, 74 bp, Artificial Sequence
  Description of Artificial Sequence: Synthetic oligonucleotide
gaaattaatacgactcactatagggatgaataataatcaacaagaacaaacagttttagagctatgctgttttg

SEQ ID NO: 3412 - DNA, 74 bp, Artificial Sequence
  Description of Artificial Sequence: Synthetic oligonucleotide
gaaattaatacgactcactatagggatgaatacaaggagagtctgcagctaggttttagagctatgctgttttg

SEQ ID NO: 3413 - DNA, 74 bp, Artificial Sequence
  Description of Artificial Sequence: Synthetic oligonucleotide
gaaattaatacgactcactatagggatgaatataggttggatgcggaagcaggttttagagctatgctgttttg

SEQ ID NO: 3414 - DNA, 74 bp, Artificial Sequence
  Description of Artificial Sequence: Synthetic oligonucleotide
gaaattaatacgactcactatagggatgaataactactagacttttaccaaggttttagagctatgctgttttg

SEQ ID NO: 3415 - DNA, 74 bp, Artificial Sequence
  Description of Artificial Sequence: Synthetic oligonucleotide
gaaattaatacgactcactatagggatgaataagattacgaagcatgagccagttttagagctatgctgttttg

SEQ ID NO: 3416 - DNA, 74 bp, Artificial Sequence
  Description of Artificial Sequence: Synthetic oligonucleotide
gaaattaatacgactcactatagggatgaatatggccactcaacttcaaggagttttagagctatgctgttttg

SEQ ID NO: 3417 - DNA, 74 bp, Artificial Sequence
  Description of Artificial Sequence: Synthetic oligonucleotide
gaaattaatacgactcactatagggatgaataagtactggagctcactgcaggttttagagctatgctgttttg

SEQ ID NO: 3418 - DNA, 74 bp, Artificial Sequence
  Description of Artificial Sequence: Synthetic oligonucleotide
gaaattaatacgactcactatagggatgaatacaacgtccatctctaaggcagttttagagctatgctgttttg

SEQ ID NO: 3419 - DNA, 74 bp, Artificial Sequence
  Description of Artificial Sequence: Synthetic oligonucleotide
gaaattaatacgactcactatagggatgaatatttctaccagttagagaagggttttagagctatgctgttttg

SEQ ID NO: 3420 - DNA, 74 bp, Artificial Sequence
  Description of Artificial Sequence: Synthetic oligonucleotide
gaaattaatacgactcactatagggatgaatatgtgctaatggaagcagccagttttagagctatgctgttttg

SEQ ID NO: 3421 - DNA, 74 bp, Artificial Sequence
  Description of Artificial Sequence: Synthetic oligonucleotide
gaaattaatacgactcactatagggatgaatacctgctcctaggaagagagcgttttagagctatgctgttttg

SEQ ID NO: 3422 - DNA, 74 bp, Artificial Sequence
  Description of Artificial Sequence: Synthetic oligonucleotide
gaaattaatacgactcactatagggatgaatagaaatttaagtcacataccagttttagagctatgctgttttg

SEQ ID NO: 3423 - DNA, 74 bp, Artificial Sequence
  Description of Artificial Sequence: Synthetic oligonucleotide
gaaattaatacgactcactatagggatgaatatatgaatagaaaccccagaggttttagagctatgctgttttg

SEQ ID NO: 3424 - DNA, 74 bp, Artificial Sequence
  Description of Artificial Sequence: Synthetic oligonucleotide
gaaattaatacgactcactatagggatgaataaggaaaccatgtgagagtaggttttagagctatgctgttttg

SEQ ID NO: 3425 - DNA, 74 bp, Artificial Sequence
  Description of Artificial Sequence: Synthetic oligonucleotide
gaaattaatacgactcactatagggatgaatatgttttaatatcaaccctgggttttagagctatgctgttttg

SEQ ID NO: 3426 - DNA, 74 bp, Artificial Sequence
  Description of Artificial Sequence: Synthetic oligonucleotide
gaaattaatacgactcactatagggatgaatagctcaagggagtcctaaaccgttttagagctatgctgttttg

SEQ ID NO: 3427 - DNA, 74 bp, Artificial Sequence
  Description of Artificial Sequence: Synthetic oligonucleotide
gaaattaatacgactcactatagggatgaataaaactatcctttataaatgagttttagagctatgctgttttg

SEQ ID NO: 3428 - DNA, 74 bp, Artificial Sequence
  Description of Artificial Sequence: Synthetic oligonucleotide
gaaattaatacgactcactatagggatgaatatgaacattcctcctaggggcgttttagagctatgctgttttg

SEQ ID NO: 3429 - DNA, 74 bp, Artificial Sequence
  Description of Artificial Sequence: Synthetic oligonucleotide
gaaattaatacgactcactatagggatgaataccagtgacagggccttagcagttttagagctatgctgttttg

SEQ ID NO: 3430 - DNA, 74 bp, Artificial Sequence
  Description of Artificial Sequence: Synthetic oligonucleotide
gaaattaatacgactcactatagggatgaatattgtggctgcaactgagtcagttttagagctatgctgttttg

SEQ ID NO: 3431 - DNA, 74 bp, Artificial Sequence
  Description of Artificial Sequence: Synthetic oligonucleotide
gaaattaatacgactcactatagggatgaataagtgcatgggttgcagctgcgttttagagctatgctgttttg

SEQ ID NO: 3432 - DNA, 74 bp, Artificial Sequence
  Description of Artificial Sequence: Synthetic oligonucleotide
gaaattaatacgactcactatagggatgaatagctgtcagtgtacactacccgttttagagctatgctgttttg

SEQ ID NO: 3433 - DNA, 74 bp, Artificial Sequence
  Description of Artificial Sequence: Synthetic oligonucleotide
gaaattaatacgactcactatagggatgaatataacagactgcacagtatccgttttagagctatgctgttttg

SEQ ID NO: 3434 - DNA, 74 bp, Artificial Sequence
  Description of Artificial Sequence: Synthetic oligonucleotide
gaaattaatacgactcactatagggatgaatatctatccccagtgctgcacagttttagagctatgctgttttg

SEQ ID NO: 3435 - DNA, 74 bp, Artificial Sequence
  Description of Artificial Sequence: Synthetic oligonucleotide
gaaattaatacgactcactatagggatgaataactgtgtgctcttggcatccgttttagagctatgctgttttg

SEQ ID NO: 3436 - DNA, 74 bp, Artificial Sequence
  Description of Artificial Sequence: Synthetic oligonucleotide
gaaattaatacgactcactatagggatgaataacagtgcacagtatacacaggttttagagctatgctgttttg

SEQ ID NO: 3437 - DNA, 74 bp, Artificial Sequence
  Description of Artificial Sequence: Synthetic oligonucleotide
gaaattaatacgactcactatagggatgaatagttgtgcactgcaaaaccccgttttagagctatgctgttttg

SEQ ID NO: 3438 - DNA, 74 bp, Artificial Sequence
  Description of Artificial Sequence: Synthetic oligonucleotide
gaaattaatacgactcactatagggatgaatacattaagggcaatgtggtgagttttagagctatgctgttttg

SEQ ID NO: 3439 - DNA, 74 bp, Artificial Sequence
  Description of Artificial Sequence: Synthetic oligonucleotide
gaaattaatacgactcactatagggatgaatagctatccacaaatctaaagggttttagagctatgctgttttg

SEQ ID NO: 3440 - DNA, 74 bp, Artificial Sequence
  Description of Artificial Sequence: Synthetic oligonucleotide
gaaattaatacgactcactatagggatgaatatgaggattgccgagaagtacgttttagagctatgctgttttg

SEQ ID NO: 3441 - DNA, 74 bp, Artificial Sequence
  Description of Artificial Sequence: Synthetic oligonucleotide
gaaattaatacgactcactatagggatgaataggacctcagtgtcctgcggcgttttagagctatgctgttttg

SEQ ID NO: 3442 - DNA, 74 bp, Artificial Sequence
  Description of Artificial Sequence: Synthetic oligonucleotide
gaaattaatacgactcactatagggatgaataagtgcccagcggcggcgcgcgttttagagctatgctgttttg

SEQ ID NO: 3443 - DNA, 74 bp, Artificial Sequence
  Description of Artificial Sequence: Synthetic oligonucleotide
gaaattaatacgactcactatagggatgaataggggggctccggaggactgggttttagagctatgctgttttg

SEQ ID NO: 3444 - DNA, 74 bp, Artificial Sequence
  Description of Artificial Sequence: Synthetic oligonucleotide
gaaattaatacgactcactatagggatgaataagttgccctcgcagcggcgggttttagagctatgctgttttg

SEQ ID NO: 3445 - DNA, 74 bp, Artificial Sequence
  Description of Artificial Sequence: Synthetic oligonucleotide
gaaattaatacgactcactatagggatgaataggtcctctgaaagaagaccagttttagagctatgctgttttg

SEQ ID NO: 3446 - DNA, 74 bp, Artificial Sequence
  Description of Artificial Sequence: Synthetic oligonucleotide
gaaattaatacgactcactatagggatgaatacctggtgtctccaaatcgcagttttagagctatgctgttttg

SEQ ID NO: 3447 - DNA, 74 bp, Artificial Sequence
  Description of Artificial Sequence: Synthetic oligonucleotide
gaaattaatacgactcactatagggatgaatagtggatctggggaggcaggagttttagagctatgctgttttg

SEQ ID NO: 3448 - DNA, 74 bp, Artificial Sequence
  Description of Artificial Sequence: Synthetic oligonucleotide
gaaattaatacgactcactatagggatgaataccttagagtaatataagaaagttttagagctatgctgttttg

SEQ ID NO: 3449 - DNA, 74 bp, Artificial Sequence
  Description of Artificial Sequence: Synthetic oligonucleotide
gaaattaatacgactcactatagggatgaataattgtacattcttttggccggttttagagctatgctgttttg

SEQ ID NO: 3450 - DNA, 74 bp, Artificial Sequence
  Description of Artificial Sequence: Synthetic oligonucleotide
gaaattaatacgactcactatagggatgaatatcttccttacttaggtacacgttttagagctatgctgttttg

SEQ ID NO: 3451 - DNA, 74 bp, Artificial Sequence
  Description of Artificial Sequence: Synthetic oligonucleotide
gaaattaatacgactcactatagggatgaatatgtccaagggcagcagatgagttttagagctatgctgttttg

SEQ ID NO: 3452 - DNA, 74 bp, Artificial Sequence
  Description of Artificial Sequence: Synthetic oligonucleotide
gaaattaatacgactcactatagggatgaatatatacgaaatgatgagggacgttttagagctatgctgttttg

SEQ ID NO: 3453 - DNA, 74 bp, Artificial Sequence
  Description of Artificial Sequence: Synthetic oligonucleotide
gaaattaatacgactcactatagggatgaatagctccacagcctaacaacccgttttagagctatgctgttttg

SEQ ID NO: 3454 - DNA, 74 bp, Artificial Sequence
  Description of Artificial Sequence: Synthetic oligonucleotide
gaaattaatacgactcactatagggatgaatacatgatgcagatagggataagttttagagctatgctgttttg

SEQ ID NO: 3455 - DNA, 74 bp, Artificial Sequence
  Description of Artificial Sequence: Synthetic oligonucleotide
gaaattaatacgactcactatagggatgaatagaggggtgcttcaaggcaaagttttagagctatgctgttttg

SEQ ID NO: 3456 - DNA, 74 bp, Artificial Sequence
  Description of Artificial Sequence: Synthetic oligonucleotide
gaaattaatacgactcactatagggatgaataagagggaaaaatgggtgtcagttttagagctatgctgttttg

SEQ ID NO: 3457 - DNA, 74 bp, Artificial Sequence
  Description of Artificial Sequence: Synthetic oligonucleotide
gaaattaatacgactcactatagggatgaataaagtattaatatatggcaccgttttagagctatgctgttttg

SEQ ID NO: 3458 - DNA, 74 bp, Artificial Sequence
  Description of Artificial Sequence: Synthetic oligonucleotide
gaaattaatacgactcactatagggatgaataaaggaatccgataggcaggggttttagagctatgctgttttg

SEQ ID NO: 3459 - DNA, 74 bp, Artificial Sequence
  Description of Artificial Sequence: Synthetic oligonucleotide
gaaattaatacgactcactatagggatgaataactggtgagactggagaagggttttagagctatgctgttttg

SEQ ID NO: 3460 - DNA, 74 bp, Artificial Sequence
  Description of Artificial Sequence: Synthetic oligonucleotide
gaaattaatacgactcactatagggatgaatatatacaaccatgggttcacagttttagagctatgctgttttg

SEQ ID NO: 3461 - DNA, 74 bp, Artificial Sequence
  Description of Artificial Sequence: Synthetic oligonucleotide
gaaattaatacgactcactatagggatgaatatcagagtggtagacagggaagttttagagctatgctgttttg

SEQ ID NO: 3462 - DNA, 74 bp, Artificial Sequence
  Description of Artificial Sequence: Synthetic oligonucleotide
gaaattaatacgactcactatagggatgaataaggtgagagtgtcagcaggggttttagagctatgctgttttg

SEQ ID NO: 3463 - DNA, 74 bp, Artificial Sequence
  Description of Artificial Sequence: Synthetic oligonucleotide
gaaattaatacgactcactatagggatgaataaatacagctactcgtaggaggttttagagctatgctgttttg

SEQ ID NO: 3464 - DNA, 74 bp, Artificial Sequence
  Description of Artificial Sequence: Synthetic oligonucleotide
gaaattaatacgactcactatagggatgaataagtctttacttacttacacagttttagagctatgctgttttg

SEQ ID NO: 3465 - DNA, 74 bp, Artificial Sequence
  Description of Artificial Sequence: Synthetic oligonucleotide
gaaattaatacgactcactatagggatgaataggacacttttgtaaaagccagttttagagctatgctgttttg

SEQ ID NO: 3466 - DNA, 74 bp, Artificial Sequence
  Description of Artificial Sequence: Synthetic oligonucleotide
gaaattaatacgactcactatagggatgaatagtgggctctccaacaggtccgttttagagctatgctgttttg

SEQ ID NO: 3467 - DNA, 74 bp, Artificial Sequence
  Description of Artificial Sequence: Synthetic oligonucleotide
gaaattaatacgactcactatagggatgaataaggagattgccacaaggtgagttttagagctatgctgttttg

SEQ ID NO: 3468 - DNA, 74 bp, Artificial Sequence
  Description of Artificial Sequence: Synthetic oligonucleotide
gaaattaatacgactcactatagggatgaataactgacatgcctgcatgagcgttttagagctatgctgttttg

SEQ ID NO: 3469 - DNA, 74 bp, Artificial Sequence
  Description of Artificial Sequence: Synthetic oligonucleotide
gaaattaatacgactcactatagggatgaatatctgatggtatgataactcagttttagagctatgctgttttg

SEQ ID NO: 3470 - DNA, 74 bp, Artificial Sequence
  Description of Artificial Sequence: Synthetic oligonucleotide
gaaattaatacgactcactatagggatgaataatgccgagggatagatctccgttttagagctatgctgttttg

SEQ ID NO: 3471 - DNA, 74 bp, Artificial Sequence
  Description of Artificial Sequence: Synthetic oligonucleotide
gaaattaatacgactcactatagggatgaatatgtacagggggtggacacaggttttagagctatgctgttttg

SEQ ID NO: 3472 - DNA, 74 bp, Artificial Sequence
  Description of Artificial Sequence: Synthetic oligonucleotide
gaaattaatacgactcactatagggatgaataaaaaggtgaaaagtttctccgttttagagctatgctgttttg

SEQ ID NO: 3473 - DNA, 74 bp, Artificial Sequence
  Description of Artificial Sequence: Synthetic oligonucleotide
gaaattaatacgactcactatagggatgaatatctgatggttgccaccaaaagttttagagctatgctgttttg

SEQ ID NO: 3474 - DNA, 74 bp, Artificial Sequence
  Description of Artificial Sequence: Synthetic oligonucleotide
gaaattaatacgactcactatagggatgaatagaggaagtatattttaacaggttttagagctatgctgttttg

SEQ ID NO: 3475 - DNA, 74 bp, Artificial Sequence
  Description of Artificial Sequence: Synthetic oligonucleotide
gaaattaatacgactcactatagggatgaataatgttcaggtgtgagcctcggttttagagctatgctgttttg

SEQ ID NO: 3476 - DNA, 74 bp, Artificial Sequence
  Description of Artificial Sequence: Synthetic oligonucleotide
gaaattaatacgactcactatagggatgaataaggtctctaacacatgctacgttttagagctatgctgttttg

SEQ ID NO: 3477 - DNA, 74 bp, Artificial Sequence
  Description of Artificial Sequence: Synthetic oligonucleotide
gaaattaatacgactcactatagggatgaataccagtgatcccccaaaaggagttttagagctatgctgttttg

SEQ ID NO: 3478 - DNA, 74 bp, Artificial Sequence
  Description of Artificial Sequence: Synthetic oligonucleotide
gaaattaatacgactcactatagggatgaatattgagttgctgagaccccaagttttagagctatgctgttttg

SEQ ID NO: 3479 - DNA, 74 bp, Artificial Sequence
  Description of Artificial Sequence: Synthetic oligonucleotide
gaaattaatacgactcactatagggatgaatatgggtagggtgaaagtgaaagttttagagctatgctgttttg

SEQ ID NO: 3480 - DNA, 74 bp, Artificial Sequence
  Description of Artificial Sequence: Synthetic oligonucleotide
gaaattaatacgactcactatagggatgaatatatttctcctcttttcagccgttttagagctatgctgttttg

SEQ ID NO: 3481 - DNA, 74 bp, Artificial Sequence
  Description of Artificial Sequence: Synthetic oligonucleotide
gaaattaatacgactcactatagggatgaataaaactttacaaggatcacaggttttagagctatgctgttttg

SEQ ID NO: 3482 - DNA, 74 bp, Artificial Sequence
  Description of Artificial Sequence: Synthetic oligonucleotide
gaaattaatacgactcactatagggatgaatagcttcctttgctgcctcccagttttagagctatgctgttttg

SEQ ID NO: 3483 - DNA, 74 bp, Artificial Sequence
  Description of Artificial Sequence: Synthetic oligonucleotide
gaaattaatacgactcactatagggatgaataggaaaatagctaggggaacggttttagagctatgctgttttg

SEQ ID NO: 3484 - DNA, 74 bp, Artificial Sequence
  Description of Artificial Sequence: Synthetic oligonucleotide
gaaattaatacgactcactatagggatgaatactgctcatgcattctgggcagttttagagctatgctgttttg

SEQ ID NO: 3485 - DNA, 74 bp, Artificial Sequence
  Description of Artificial Sequence: Synthetic oligonucleotide
gaaattaatacgactcactatagggatgaataaatctgagcgatctctataggttttagagctatgctgttttg

SEQ ID NO: 3486 - DNA, 74 bp, Artificial Sequence
  Description of Artificial Sequence: Synthetic oligonucleotide
gaaattaatacgactcactatagggatgaataacaagaggcactgtttctcagttttagagctatgctgttttg

SEQ ID NO: 3487 - DNA, 74 bp, Artificial Sequence
  Description of Artificial Sequence: Synthetic oligonucleotide
gaaattaatacgactcactatagggatgaatataagcagtgcagagtgccacgttttagagctatgctgttttg

SEQ ID NO: 3488 - DNA, 74 bp, Artificial Sequence
  Description of Artificial Sequence: Synthetic oligonucleotide
gaaattaatacgactcactatagggatgaataaggcaattggatgagagtcagttttagagctatgctgttttg

SEQ ID NO: 3489 - DNA, 74 bp, Artificial Sequence
  Description of Artificial Sequence: Synthetic oligonucleotide
gaaattaatacgactcactatagggatgaatagtgatgacaacggatggtaagttttagagctatgctgttttg

SEQ ID NO: 3490 - DNA, 74 bp, Artificial Sequence
  Description of Artificial Sequence: Synthetic oligonucleotide
gaaattaatacgactcactatagggatgaatagatagaattttcaagtaccagttttagagctatgctgttttg

SEQ ID NO: 3491 - DNA, 74 bp, Artificial Sequence
  Description of Artificial Sequence: Synthetic oligonucleotide
gaaattaatacgactcactatagggatgaataggtgaagatccttaaagcaagttttagagctatgctgttttg

SEQ ID NO: 3492 - DNA, 74 bp, Artificial Sequence
  Description of Artificial Sequence: Synthetic oligonucleotide
gaaattaatacgactcactatagggatgaatagtgtagatgaggactggtaagttttagagctatgctgttttg

SEQ ID NO: 3493 - DNA, 74 bp, Artificial Sequence
  Description of Artificial Sequence: Synthetic oligonucleotide
gaaattaatacgactcactatagggatgaataaggttgggaaggaattgagagttttagagctatgctgttttg

SEQ ID NO: 3494 - DNA, 74 bp, Artificial Sequence
  Description of Artificial Sequence: Synthetic oligonucleotide
gaaattaatacgactcactatagggatgaatagttctcagcctcctacatgcgttttagagctatgctgttttg

SEQ ID NO: 3495 - DNA, 74 bp, Artificial Sequence
  Description of Artificial Sequence: Synthetic oligonucleotide
gaaattaatacgactcactatagggatgaatatatagagaggattgtgataggttttagagctatgctgttttg

SEQ ID NO: 3496 - DNA, 74 bp, Artificial Sequence
  Description of Artificial Sequence: Synthetic oligonucleotide
gaaattaatacgactcactatagggatgaatactgatgtgcacacagtgtgagttttagagctatgctgttttg

SEQ ID NO: 3497 - DNA, 74 bp, Artificial Sequence
  Description of Artificial Sequence: Synthetic oligonucleotide
gaaattaatacgactcactatagggatgaatactattgaggactctctgtgcgttttagagctatgctgttttg

SEQ ID NO: 3498 - DNA, 74 bp, Artificial Sequence
  Description of Artificial Sequence: Synthetic oligonucleotide
gaaattaatacgactcactatagggatgaataggatagagatttggcccccagttttagagctatgctgttttg

SEQ ID NO: 3499 - DNA, 74 bp, Artificial Sequence
  Description of Artificial Sequence: Synthetic oligonucleotide
gaaattaatacgactcactatagggatgaatagaagggtgcacccttacagagttttagagctatgctgttttg

SEQ ID NO: 3500 - DNA, 74 bp, Artificial Sequence
  Description of Artificial Sequence: Synthetic oligonucleotide
gaaattaatacgactcactatagggatgaatataaagtttcagtgctgctaagttttagagctatgctgttttg

SEQ ID NO: 3501 - DNA, 74 bp, Artificial Sequence
  Description of Artificial Sequence: Synthetic oligonucleotide
gaaattaatacgactcactatagggatgaatataacaataatctattcatgagttttagagctatgctgttttg

SEQ ID NO: 3502 - DNA, 74 bp, Artificial Sequence
  Description of Artificial Sequence: Synthetic oligonucleotide
gaaattaatacgactcactatagggatgaataagttgccccatggcagaagggttttagagctatgctgttttg

SEQ ID NO: 3503 - DNA, 74 bp, Artificial Sequence
  Description of Artificial Sequence: Synthetic oligonucleotide
gaaattaatacgactcactatagggatgaatatttgtgttgctctaacagacgttttagagctatgctgttttg

SEQ ID NO: 3504 - DNA, 74 bp, Artificial Sequence
  Description of Artificial Sequence: Synthetic oligonucleotide
gaaattaatacgactcactatagggatgaatatgttacatcttttaggagaagttttagagctatgctgttttg

SEQ ID NO: 3505 - DNA, 74 bp, Artificial Sequence
  Description of Artificial Sequence: Synthetic oligonucleotide
gaaattaatacgactcactatagggatgaatataatgtttctatggcggaaggttttagagctatgctgttttg

SEQ ID NO: 3506 - DNA, 74 bp, Artificial Sequence
  Description of Artificial Sequence: Synthetic oligonucleotide
gaaattaatacgactcactatagggatgaatactaattattatgctaaaaccgttttagagctatgctgttttg

SEQ ID NO: 3507 - DNA, 74 bp, Artificial Sequence
  Description of Artificial Sequence: Synthetic oligonucleotide
gaaattaatacgactcactatagggatgaataagtgctgggctttactgtaggttttagagctatgctgttttg

SEQ ID NO: 3508 - DNA, 74 bp, Artificial Sequence
  Description of Artificial Sequence: Synthetic oligonucleotide
gaaattaatacgactcactatagggatgaataattttgtctcatgttggggcgttttagagctatgctgttttg

SEQ ID NO: 3509 - DNA, 74 bp, Artificial Sequence
  Description of Artificial Sequence: Synthetic oligonucleotide
gaaattaatacgactcactatagggatgaataaggctgttgcagtcagctgggttttagagctatgctgttttg

SEQ ID NO: 3510 - DNA, 74 bp, Artificial Sequence
  Description of Artificial Sequence: Synthetic oligonucleotide
gaaattaatacgactcactatagggatgaatatggtaactttcttccgcagcgttttagagctatgctgttttg

SEQ ID NO: 3511 - DNA, 74 bp, Artificial Sequence
  Description of Artificial Sequence: Synthetic oligonucleotide
gaaattaatacgactcactatagggatgaataaggaatgcattcctttcccagttttagagctatgctgttttg

SEQ ID NO: 3512 - DNA, 74 bp, Artificial Sequence
  Description of Artificial Sequence: Synthetic oligonucleotide
gaaattaatacgactcactatagggatgaatagagggtactgcaggagaccagttttagagctatgctgttttg

SEQ ID NO: 3513 - DNA, 74 bp, Artificial Sequence
  Description of Artificial Sequence: Synthetic oligonucleotide
gaaattaatacgactcactatagggatgaatacagtgcctgactcaatcacagttttagagctatgctgttttg

SEQ ID NO: 3514 - DNA, 74 bp, Artificial Sequence
  Description of Artificial Sequence: Synthetic oligonucleotide
gaaattaatacgactcactatagggatgaataaagtgggaacctggagggaagttttagagctatgctgttttg

SEQ ID NO: 3515 - DNA, 74 bp, Artificial Sequence
  Description of Artificial Sequence: Synthetic oligonucleotide
gaaattaatacgactcactatagggatgaataccaaactacacccagaatgggttttagagctatgctgttttg

SEQ ID NO: 3516 - DNA, 74 bp, Artificial Sequence
  Description of Artificial Sequence: Synthetic oligonucleotide
gaaattaatacgactcactatagggatgaatatatttgtaggaatcccaaacgttttagagctatgctgttttg

SEQ ID NO: 3517 - DNA, 74 bp, Artificial Sequence
  Description of Artificial Sequence: Synthetic oligonucleotide
gaaattaatacgactcactatagggatgaatatcaaaatcagcttcagagaagttttagagctatgctgttttg

SEQ ID NO: 3518 - DNA, 74 bp, Artificial Sequence
  Description of Artificial Sequence: Synthetic oligonucleotide
gaaattaatacgactcactatagggatgaataggtaatttacagattggcccgttttagagctatgctgttttg

SEQ ID NO: 3519 - DNA, 74 bp, Artificial Sequence
  Description of Artificial Sequence: Synthetic oligonucleotide
gaaattaatacgactcactatagggatgaatacaggataaatcaaaaactcagttttagagctatgctgttttg

SEQ ID NO: 3520 - DNA, 74 bp, Artificial Sequence
  Description of Artificial Sequence: Synthetic oligonucleotide
gaaattaatacgactcactatagggatgaatacaggtaaacttgtgtcatgggttttagagctatgctgttttg

SEQ ID NO: 3521 - DNA, 74 bp, Artificial Sequence
  Description of Artificial Sequence: Synthetic oligonucleotide
gaaattaatacgactcactatagggatgaataaaagcactaaagatatagccgttttagagctatgctgttttg

SEQ ID NO: 3522 - DNA, 74 bp, Artificial Sequence
  Description of Artificial Sequence: Synthetic oligonucleotide
gaaattaatacgactcactatagggatgaatatttgttatgcagtagcaagggttttagagctatgctgttttg

SEQ ID NO: 3523 - DNA, 74 bp, Artificial Sequence
  Description of Artificial Sequence: Synthetic oligonucleotide
gaaattaatacgactcactatagggatgaatatatgtttgtctatactaaacgttttagagctatgctgttttg

SEQ ID NO: 3524 - DNA, 74 bp, Artificial Sequence
  Description of Artificial Sequence: Synthetic oligonucleotide
gaaattaatacgactcactatagggatgaataacacgcctgctctcagctcagttttagagctatgctgttttg

SEQ ID NO: 3525 - DNA, 74 bp, Artificial Sequence
  Description of Artificial Sequence: Synthetic oligonucleotide
gaaattaatacgactcactatagggatgaatacattgatatagcggtcatgcgttttagagctatgctgttttg

SEQ ID NO: 3526 - DNA, 74 bp, Artificial Sequence
  Description of Artificial Sequence: Synthetic oligonucleotide
gaaattaatacgactcactatagggatgaatagatgttaggctccagccagcgttttagagctatgctgttttg

SEQ ID NO: 3527 - DNA, 74 bp, Artificial Sequence
  Description of Artificial Sequence: Synthetic oligonucleotide
gaaattaatacgactcactatagggatgaatagtgtgtaaggaatgcaagaagttttagagctatgctgttttg

SEQ ID NO: 3528 - DNA, 74 bp, Artificial Sequence
  Description of Artificial Sequence: Synthetic oligonucleotide
gaaattaatacgactcactatagggatgaataggaatagactctgagaaggagttttagagctatgctgttttg

SEQ ID NO: 3529 - DNA, 74 bp, Artificial Sequence
  Description of Artificial Sequence: Synthetic oligonucleotide
gaaattaatacgactcactatagggatgaatacggggcttgctggttggggagttttagagctatgctgttttg

SEQ ID NO: 3530 - DNA, 74 bp, Artificial Sequence
  Description of Artificial Sequence: Synthetic oligonucleotide
gaaattaatacgactcactatagggatgaatataaaaaataataaaaggaaagttttagagctatgctgttttg

SEQ ID NO: 3531 - DNA, 74 bp, Artificial Sequence
  Description of Artificial Sequence: Synthetic oligonucleotide
gaaattaatacgactcactatagggatgaatagaagggtgggaggaaagtgagttttagagctatgctgttttg

SEQ ID NO: 3532 - DNA, 74 bp, Artificial Sequence
  Description of Artificial Sequence: Synthetic oligonucleotide
gaaattaatacgactcactatagggatgaatattttaatactgcttatctcagttttagagctatgctgttttg

SEQ ID NO: 3533 - DNA, 74 bp, Artificial Sequence
  Description of Artificial Sequence: Synthetic oligonucleotide
gaaattaatacgactcactatagggatgaataagtgtgcagcatctccaaacgttttagagctatgctgttttg

SEQ ID NO: 3534 - DNA, 74 bp, Artificial Sequence
  Description of Artificial Sequence: Synthetic oligonucleotide
gaaattaatacgactcactatagggatgaataggagctatgaatattcataagttttagagctatgctgttttg

SEQ ID NO: 3535 - DNA, 74 bp, Artificial Sequence
  Description of Artificial Sequence: Synthetic oligonucleotide
gaaattaatacgactcactatagggatgaataagaaaggggaaggtggaacagttttagagctatgctgttttg

SEQ ID NO: 3536 - DNA, 74 bp, Artificial Sequence
  Description of Artificial Sequence: Synthetic oligonucleotide
gaaattaatacgactcactatagggatgaatatataaaagtttattaacgaagttttagagctatgctgttttg

SEQ ID NO: 3537 - DNA, 74 bp, Artificial Sequence
  Description of Artificial Sequence: Synthetic oligonucleotide
gaaattaatacgactcactatagggatgaatatattagacgcctagaacccagttttagagctatgctgttttg

SEQ ID NO: 3538 - DNA, 74 bp, Artificial Sequence
  Description of Artificial Sequence: Synthetic oligonucleotide
gaaattaatacgactcactatagggatgaatataagaacagcagctgtgaaggttttagagctatgctgttttg

SEQ ID NO: 3539 - DNA, 74 bp, Artificial Sequence
  Description of Artificial Sequence: Synthetic oligonucleotide
gaaattaatacgactcactatagggatgaatatctggatatactatgaaagggttttagagctatgctgttttg

SEQ ID NO: 3540 - DNA, 74 bp, Artificial Sequence
  Description of Artificial Sequence: Synthetic oligonucleotide
gaaattaatacgactcactatagggatgaatacctcatctaaatctctgtaagttttagagctatgctgttttg

SEQ ID NO: 3541 - DNA, 74 bp, Artificial Sequence
  Description of Artificial Sequence: Synthetic oligonucleotide
gaaattaatacgactcactatagggatgaatatttataatactttctactgagttttagagctatgctgttttg

SEQ ID NO: 3542 - DNA, 74 bp, Artificial Sequence
  Description of Artificial Sequence: Synthetic oligonucleotide
gaaattaatacgactcactatagggatgaatacaaagctgagataatcacaggttttagagctatgctgttttg

SEQ ID NO: 3543 - DNA, 74 bp, Artificial Sequence
  Description of Artificial Sequence: Synthetic oligonucleotide
gaaattaatacgactcactatagggatgaataaggtccagacctactagagcgttttagagctatgctgttttg

SEQ ID NO: 3544 - DNA, 74 bp, Artificial Sequence
  Description of Artificial Sequence: Synthetic oligonucleotide
gaaattaatacgactcactatagggatgaatatctgctaacaacattaataagttttagagctatgctgttttg

SEQ ID NO: 3545 - DNA, 74 bp, Artificial Sequence
  Description of Artificial Sequence: Synthetic oligonucleotide
gaaattaatacgactcactatagggatgaataataactcaaattgtaacgccgttttagagctatgctgttttg

SEQ ID NO: 3546 - DNA, 74 bp, Artificial Sequence
  Description of Artificial Sequence: Synthetic oligonucleotide
gaaattaatacgactcactatagggatgaatagaaaaaagactttagggaaagttttagagctatgctgttttg

SEQ ID NO: 3547 - DNA, 74 bp, Artificial Sequence
  Description of Artificial Sequence: Synthetic oligonucleotide
gaaattaatacgactcactatagggatgaatatgggcacatactaataaaaggttttagagctatgctgttttg

SEQ ID NO: 3548 - DNA, 74 bp, Artificial Sequence
  Description of Artificial Sequence: Synthetic oligonucleotide
gaaattaatacgactcactatagggatgaataacaaacaaaaacaaagctgggttttagagctatgctgttttg

SEQ ID NO: 3549 - DNA, 74 bp, Artificial Sequence
  Description of Artificial Sequence: Synthetic oligonucleotide
gaaattaatacgactcactatagggatgaataagaccattttaaaattcacagttttagagctatgctgttttg

SEQ ID NO: 3550 - DNA, 74 bp, Artificial Sequence
  Description of Artificial Sequence: Synthetic oligonucleotide
gaaattaatacgactcactatagggatgaataagatccatgaatccggcaccgttttagagctatgctgttttg

SEQ ID NO: 3551 - DNA, 74 bp, Artificial Sequence
  Description of Artificial Sequence: Synthetic oligonucleotide
gaaattaatacgactcactatagggatgaataaggcaaacaaatcccagggcgttttagagctatgctgttttg

SEQ ID NO: 3552 - DNA, 74 bp, Artificial Sequence
  Description of Artificial Sequence: Synthetic oligonucleotide
gaaattaatacgactcactatagggatgaatacagctaaggcagtgttaagagttttagagctatgctgttttg

SEQ ID NO: 3553 - DNA, 74 bp, Artificial Sequence
  Description of Artificial Sequence: Synthetic oligonucleotide
gaaattaatacgactcactatagggatgaataatgacaaccactcatacagagttttagagctatgctgttttg

SEQ ID NO: 3554 - DNA, 74 bp, Artificial Sequence
  Description of Artificial Sequence: Synthetic oligonucleotide
gaaattaatacgactcactatagggatgaataagaagcaggcaaatgaaagggttttagagctatgctgttttg

SEQ ID NO: 3555 - DNA, 74 bp, Artificial Sequence
  Description of Artificial Sequence: Synthetic oligonucleotide
gaaattaatacgactcactatagggatgaatatgtgggctacattattatgggttttagagctatgctgttttg

SEQ ID NO: 3556 - DNA, 74 bp, Artificial Sequence
  Description of Artificial Sequence: Synthetic oligonucleotide
gaaattaatacgactcactatagggatgaatactaaacactctgggacagaagttttagagctatgctgttttg

SEQ ID NO: 3557 - DNA, 74 bp, Artificial Sequence
  Description of Artificial Sequence: Synthetic oligonucleotide
gaaattaatacgactcactatagggatgaatacagtgctgtcctggaaaagcgttttagagctatgctgttttg

SEQ ID NO: 3558 - DNA, 74 bp, Artificial Sequence
  Description of Artificial Sequence: Synthetic oligonucleotide
gaaattaatacgactcactatagggatgaatactatctcagcagccacagcagttttagagctatgctgttttg

SEQ ID NO: 3559 - DNA, 74 bp, Artificial Sequence
  Description of Artificial Sequence: Synthetic oligonucleotide
gaaattaatacgactcactatagggatgaataaaaaatcagtcttaaaccacgttttagagctatgctgttttg

SEQ ID NO: 3560 - DNA, 74 bp, Artificial Sequence
  Description of Artificial Sequence: Synthetic oligonucleotide
gaaattaatacgactcactatagggatgaatattatcatgcttgataagagggttttagagctatgctgttttg

SEQ ID NO: 3561 - DNA, 74 bp, Artificial Sequence
  Description of Artificial Sequence: Synthetic oligonucleotide
gaaattaatacgactcactatagggatgaatacaatttgaaccaaatcctgagttttagagctatgctgttttg

SEQ ID NO: 3562 - DNA, 74 bp, Artificial Sequence
  Description of Artificial Sequence: Synthetic oligonucleotide
gaaattaatacgactcactatagggatgaatacatgccactgcattccagccgttttagagctatgctgttttg

SEQ ID NO: 3563 - DNA, 74 bp, Artificial Sequence
  Description of Artificial Sequence: Synthetic oligonucleotide
gaaattaatacgactcactatagggatgaataaaaaaattagctggatgtgggttttagagctatgctgttttg

SEQ ID NO: 3564 - DNA, 74 bp, Artificial Sequence
  Description of Artificial Sequence: Synthetic oligonucleotide
gaaattaatacgactcactatagggatgaataatatttgttcatgtctaaaggttttagagctatgctgttttg

SEQ ID NO: 3565 - DNA, 74 bp, Artificial Sequence
  Description of Artificial Sequence: Synthetic oligonucleotide
gaaattaatacgactcactatagggatgaatattggcatattggtgaagaacgttttagagctatgctgttttg

SEQ ID NO: 3566 - DNA, 74 bp, Artificial Sequence
  Description of Artificial Sequence: Synthetic oligonucleotide
gaaattaatacgactcactatagggatgaatagtttggcagatccctacagagttttagagctatgctgttttg

SEQ ID NO: 3567 - DNA, 74 bp, Artificial Sequence
  Description of Artificial Sequence: Synthetic oligonucleotide
gaaattaatacgactcactatagggatgaataacatggattaacttaaccccgttttagagctatgctgttttg

SEQ ID NO: 3568 - DNA, 74 bp, Artificial Sequence
  Description of Artificial Sequence: Synthetic oligonucleotide
gaaattaatacgactcactatagggatgaatagattgatgtctttatgaaacgttttagagctatgctgttttg

SEQ ID NO: 3569 - DNA, 74 bp, Artificial Sequence
  Description of Artificial Sequence: Synthetic oligonucleotide
gaaattaatacgactcactatagggatgaatacctccatttcatagaaagccgttttagagctatgctgttttg

SEQ ID NO: 3570 - DNA, 74 bp, Artificial Sequence
  Description of Artificial Sequence: Synthetic oligonucleotide
gaaattaatacgactcactatagggatgaatactttgggagaccaaggcagggttttagagctatgctgttttg

SEQ ID NO: 3571 - DNA, 74 bp, Artificial Sequence
  Description of Artificial Sequence: Synthetic oligonucleotide
gaaattaatacgactcactatagggatgaataaaaacttgtttgatttctcagttttagagctatgctgttttg

SEQ ID NO: 3572 - DNA, 74 bp, Artificial Sequence
  Description of Artificial Sequence: Synthetic oligonucleotide
gaaattaatacgactcactatagggatgaatacctacttctttctttgggaagttttagagctatgctgttttg

SEQ ID NO: 3573 - DNA, 74 bp, Artificial Sequence
  Description of Artificial Sequence: Synthetic oligonucleotide
gaaattaatacgactcactatagggatgaatacgtacctagcaaattcatgggttttagagctatgctgttttg

SEQ ID NO: 3574 - DNA, 74 bp, Artificial Sequence
  Description of Artificial Sequence: Synthetic oligonucleotide
gaaattaatacgactcactatagggatgaataactgcagaaatcccacacaagttttagagctatgctgttttg

SEQ ID NO: 3575 - DNA, 74 bp, Artificial Sequence
  Description of Artificial Sequence: Synthetic oligonucleotide
gaaattaatacgactcactatagggatgaatatctgtggcacaagccagaccgttttagagctatgctgttttg

SEQ ID NO: 3576 - DNA, 74 bp, Artificial Sequence
  Description of Artificial Sequence: Synthetic oligonucleotide
gaaattaatacgactcactatagggatgaataattatggtctcagaatgccagttttagagctatgctgttttg

SEQ ID NO: 3577 - DNA, 74 bp, Artificial Sequence
  Description of Artificial Sequence: Synthetic oligonucleotide
gaaattaatacgactcactatagggatgaatactaatttatccctcttggaagttttagagctatgctgttttg

SEQ ID NO: 3578 - DNA, 74 bp, Artificial Sequence
  Description of Artificial Sequence: Synthetic oligonucleotide
gaaattaatacgactcactatagggatgaatatgtggtctggatgtaagacagttttagagctatgctgttttg

SEQ ID NO: 3579 - DNA, 74 bp, Artificial Sequence
  Description of Artificial Sequence: Synthetic oligonucleotide
gaaattaatacgactcactatagggatgaatatttctcactgttctggaggcgttttagagctatgctgttttg

SEQ ID NO: 3580 - DNA, 74 bp, Artificial Sequence
  Description of Artificial Sequence: Synthetic oligonucleotide
gaaattaatacgactcactatagggatgaatagaggtacatatcccaaagcagttttagagctatgctgttttg

SEQ ID NO: 3581 - DNA, 74 bp, Artificial Sequence
  Description of Artificial Sequence: Synthetic oligonucleotide
gaaattaatacgactcactatagggatgaatagcagggccaaatagtagcacgttttagagctatgctgttttg

SEQ ID NO: 3582 - DNA, 74 bp, Artificial Sequence
  Description of Artificial Sequence: Synthetic oligonucleotide
gaaattaatacgactcactatagggatgaatacttttctcgatactacaagagttttagagctatgctgttttg

SEQ ID NO: 3583 - DNA, 74 bp, Artificial Sequence
  Description of Artificial Sequence: Synthetic oligonucleotide
gaaattaatacgactcactatagggatgaatatatgatccttatcatcctaggttttagagctatgctgttttg

SEQ ID NO: 3584 - DNA, 74 bp, Artificial Sequence
  Description of Artificial Sequence: Synthetic oligonucleotide
gaaattaatacgactcactatagggatgaataagacgtaatgcctagaatgagttttagagctatgctgttttg

SEQ ID NO: 3585 - DNA, 74 bp, Artificial Sequence
  Description of Artificial Sequence: Synthetic oligonucleotide
gaaattaatacgactcactatagggatgaatacaataatcagatggacaaaagttttagagctatgctgttttg

SEQ ID NO: 3586 - DNA, 74 bp, Artificial Sequence
  Description of Artificial Sequence: Synthetic oligonucleotide
gaaattaatacgactcactatagggatgaatagctaacctcccactcaggaggttttagagctatgctgttttg

SEQ ID NO: 3587 - DNA, 74 bp, Artificial Sequence
  Description of Artificial Sequence: Synthetic oligonucleotide
gaaattaatacgactcactatagggatgaatacggccagttgactgcagaaagttttagagctatgctgttttg

SEQ ID NO: 3588 - DNA, 74 bp, Artificial Sequence
  Description of Artificial Sequence: Synthetic oligonucleotide
gaaattaatacgactcactatagggatgaatacatgttttcacagggagtgggttttagagctatgctgttttg

SEQ ID NO: 3589 - DNA, 74 bp, Artificial Sequence
  Description of Artificial Sequence: Synthetic oligonucleotide
gaaattaatacgactcactatagggatgaatatatcacacaattaaataaaagttttagagctatgctgttttg

SEQ ID NO: 3590 - DNA, 74 bp, Artificial Sequence
  Description of Artificial Sequence: Synthetic oligonucleotide
gaaattaatacgactcactatagggatgaataatgcatttcctgatctcaaggttttagagctatgctgttttg

SEQ ID NO: 3591 - DNA, 74 bp, Artificial Sequence
  Description of Artificial Sequence: Synthetic oligonucleotide
gaaattaatacgactcactatagggatgaatatagattggataagttagcaagttttagagctatgctgttttg

SEQ ID NO: 3592 - DNA, 74 bp, Artificial Sequence
  Description of Artificial Sequence: Synthetic oligonucleotide
gaaattaatacgactcactatagggatgaatattgccagggatcttcccccagttttagagctatgctgttttg

SEQ ID NO: 3593 - DNA, 74 bp, Artificial Sequence
  Description of Artificial Sequence: Synthetic oligonucleotide
gaaattaatacgactcactatagggatgaataaaatcgctgaggatcaagacgttttagagctatgctgttttg

SEQ ID NO: 3594 - DNA, 74 bp, Artificial Sequence
  Description of Artificial Sequence: Synthetic oligonucleotide
gaaattaatacgactcactatagggatgaataagtgagtggctgaagtgggagttttagagctatgctgttttg

SEQ ID NO: 3595 - DNA, 74 bp, Artificial Sequence
  Description of Artificial Sequence: Synthetic oligonucleotide
gaaattaatacgactcactatagggatgaataaaggtgcctgactagaatcagttttagagctatgctgttttg

SEQ ID NO: 3596 - DNA, 74 bp, Artificial Sequence
  Description of Artificial Sequence: Synthetic oligonucleotide
gaaattaatacgactcactatagggatgaatacatgcactcctgcagagcccgttttagagctatgctgttttg

SEQ ID NO: 3597 - DNA, 74 bp, Artificial Sequence
  Description of Artificial Sequence: Synthetic oligonucleotide
gaaattaatacgactcactatagggatgaataccttgtaatatcaagacagagttttagagctatgctgttttg

SEQ ID NO: 3598 - DNA, 74 bp, Artificial Sequence
  Description of Artificial Sequence: Synthetic oligonucleotide
gaaattaatacgactcactatagggatgaataaaaaaaaaaaaaaaaggacagttttagagctatgctgttttg

SEQ ID NO: 3599 - DNA, 74 bp, Artificial Sequence
  Description of Artificial Sequence: Synthetic oligonucleotide
gaaattaatacgactcactatagggatgaatatggtctggggagccttatgggttttagagctatgctgttttg

SEQ ID NO: 3600 - DNA, 74 bp, Artificial Sequence
  Description of Artificial Sequence: Synthetic oligonucleotide
gaaattaatacgactcactatagggatgaatatcgtttctaccagtggaccagttttagagctatgctgttttg

SEQ ID NO: 3601 - DNA, 74 bp, Artificial Sequence
  Description of Artificial Sequence: Synthetic oligonucleotide
gaaattaatacgactcactatagggatgaataaaataacaaaaagatggggggttttagagctatgctgttttg

SEQ ID NO: 3602 - DNA, 74 bp, Artificial Sequence
  Description of Artificial Sequence: Synthetic oligonucleotide
gaaattaatacgactcactatagggatgaatatgggtattatcctggtgagggttttagagctatgctgttttg

SEQ ID NO: 3603 - DNA, 74 bp, Artificial Sequence
  Description of Artificial Sequence: Synthetic oligonucleotide
gaaattaatacgactcactatagggatgaatatgtttggctgaccactggccgttttagagctatgctgttttg

SEQ ID NO: 3604 - DNA, 74 bp, Artificial Sequence
  Description of Artificial Sequence: Synthetic oligonucleotide
gaaattaatacgactcactatagggatgaataccaatctggggctgttcagcgttttagagctatgctgttttg

SEQ ID NO: 3605 - DNA, 74 bp, Artificial Sequence
  Description of Artificial Sequence: Synthetic oligonucleotide
gaaattaatacgactcactatagggatgaatagaagccactaggggagacccgttttagagctatgctgttttg

SEQ ID NO: 3606 - DNA, 74 bp, Artificial Sequence
  Description of Artificial Sequence: Synthetic oligonucleotide
gaaattaatacgactcactatagggatgaataagatgtccggtgcctggtccgttttagagctatgctgttttg

SEQ ID NO: 3607 - DNA, 74 bp, Artificial Sequence
  Description of Artificial Sequence: Synthetic oligonucleotide
gaaattaatacgactcactatagggatgaataagtctttgaactggctgcacgttttagagctatgctgttttg

SEQ ID NO: 3608 - DNA, 74 bp, Artificial Sequence
  Description of Artificial Sequence: Synthetic oligonucleotide
gaaattaatacgactcactatagggatgaataaaaacattaagatcttgccagttttagagctatgctgttttg

SEQ ID NO: 3609 - DNA, 74 bp, Artificial Sequence
  Description of Artificial Sequence: Synthetic oligonucleotide
gaaattaatacgactcactatagggatgaatacaaggcaatgattcctgagagttttagagctatgctgttttg

SEQ ID NO: 3610 - DNA, 74 bp, Artificial Sequence
  Description of Artificial Sequence: Synthetic oligonucleotide
gaaattaatacgactcactatagggatgaatacatgcatgacccccacccaggttttagagctatgctgttttg

SEQ ID NO: 3611 - DNA, 74 bp, Artificial Sequence
  Description of Artificial Sequence: Synthetic oligonucleotide
gaaattaatacgactcactatagggatgaataggaatccaatctaaaggcaggttttagagctatgctgttttg

SEQ ID NO: 3612 - DNA, 74 bp, Artificial Sequence
  Description of Artificial Sequence: Synthetic oligonucleotide
gaaattaatacgactcactatagggatgaataaaataaaggaaggagagccagttttagagctatgctgttttg

SEQ ID NO: 3613 - DNA, 74 bp, Artificial Sequence
  Description of Artificial Sequence: Synthetic oligonucleotide
gaaattaatacgactcactatagggatgaataaaaatatagtcaacagccccgttttagagctatgctgttttg

SEQ ID NO: 3614 - DNA, 74 bp, Artificial Sequence
  Description of Artificial Sequence: Synthetic oligonucleotide
gaaattaatacgactcactatagggatgaatagagaggtgagactagagggagttttagagctatgctgttttg

SEQ ID NO: 3615 - DNA, 74 bp, Artificial Sequence
  Description of Artificial Sequence: Synthetic oligonucleotide
gaaattaatacgactcactatagggatgaatagtactgaataatcaaaagcagttttagagctatgctgttttg

SEQ ID NO: 3616 - DNA, 74 bp, Artificial Sequence
  Description of Artificial Sequence: Synthetic oligonucleotide
gaaattaatacgactcactatagggatgaataaaaaaggagtatgaaactaagttttagagctatgctgttttg

SEQ ID NO: 3617 - DNA, 74 bp, Artificial Sequence
  Description of Artificial Sequence: Synthetic oligonucleotide
gaaattaatacgactcactatagggatgaataatgacatgacagggaaccacgttttagagctatgctgttttg

SEQ ID NO: 3618 - DNA, 74 bp, Artificial Sequence
  Description of Artificial Sequence: Synthetic oligonucleotide
gaaattaatacgactcactatagggatgaataattttaccagcttctcagaagttttagagctatgctgttttg

SEQ ID NO: 3619 - DNA, 74 bp, Artificial Sequence
  Description of Artificial Sequence: Synthetic oligonucleotide
gaaattaatacgactcactatagggatgaatagttttctctcactaccgcaagttttagagctatgctgttttg

SEQ ID NO: 3620 - DNA, 74 bp, Artificial Sequence
  Description of Artificial Sequence: Synthetic oligonucleotide
gaaattaatacgactcactatagggatgaatatgaggaaattgagactctgagttttagagctatgctgttttg

SEQ ID NO: 3621 - DNA, 74 bp, Artificial Sequence
  Description of Artificial Sequence: Synthetic oligonucleotide
gaaattaatacgactcactatagggatgaataataaaacataagcagccccagttttagagctatgctgttttg

SEQ ID NO: 3622 - DNA, 74 bp, Artificial Sequence
  Description of Artificial Sequence: Synthetic oligonucleotide
gaaattaatacgactcactatagggatgaataaatctgttaattggtaagaagttttagagctatgctgttttg

SEQ ID NO: 3623 - DNA, 74 bp, Artificial Sequence
  Description of Artificial Sequence: Synthetic oligonucleotide
gaaattaatacgactcactatagggatgaatacaaagctagagctcaaaacagttttagagctatgctgttttg

SEQ ID NO: 3624 - DNA, 74 bp, Artificial Sequence
  Description of Artificial Sequence: Synthetic oligonucleotide
gaaattaatacgactcactatagggatgaatatcaatagagaaggaagaaaagttttagagctatgctgttttg

SEQ ID NO: 3625 - DNA, 74 bp, Artificial Sequence
  Description of Artificial Sequence: Synthetic oligonucleotide
gaaattaatacgactcactatagggatgaataagtattggacaaaaacacccgttttagagctatgctgttttg

SEQ ID NO: 3626 - DNA, 74 bp, Artificial Sequence
  Description of Artificial Sequence: Synthetic oligonucleotide
gaaattaatacgactcactatagggatgaataaaacagcactaacagaatacgttttagagctatgctgttttg

SEQ ID NO: 3627 - DNA, 74 bp, Artificial Sequence
  Description of Artificial Sequence: Synthetic oligonucleotide
gaaattaatacgactcactatagggatgaatacgtctaaattatttgccagcgttttagagctatgctgttttg

SEQ ID NO: 3628 - DNA, 74 bp, Artificial Sequence
  Description of Artificial Sequence: Synthetic oligonucleotide
gaaattaatacgactcactatagggatgaatagctatcaaatacagaaagaagttttagagctatgctgttttg

SEQ ID NO: 3629 - DNA, 74 bp, Artificial Sequence
  Description of Artificial Sequence: Synthetic oligonucleotide
gaaattaatacgactcactatagggatgaatattatgaatatgaggtcccaagttttagagctatgctgttttg

SEQ ID NO: 3630 - DNA, 74 bp, Artificial Sequence
  Description of Artificial Sequence: Synthetic oligonucleotide
gaaattaatacgactcactatagggatgaatagcttacctgttgtaaggtgagttttagagctatgctgttttg

SEQ ID NO: 3631 - DNA, 74 bp, Artificial Sequence
  Description of Artificial Sequence: Synthetic oligonucleotide
gaaattaatacgactcactatagggatgaatacagcaagggccaggtcacaagttttagagctatgctgttttg

SEQ ID NO: 3632 - DNA, 74 bp, Artificial Sequence
  Description of Artificial Sequence: Synthetic oligonucleotide
gaaattaatacgactcactatagggatgaatagctttgagaagtcttcccaagttttagagctatgctgttttg

SEQ ID NO: 3633 - DNA, 74 bp, Artificial Sequence
  Description of Artificial Sequence: Synthetic oligonucleotide
gaaattaatacgactcactatagggatgaataggagagtaacatatgtaaacgttttagagctatgctgttttg

SEQ ID NO: 3634 - DNA, 74 bp, Artificial Sequence
  Description of Artificial Sequence: Synthetic oligonucleotide
gaaattaatacgactcactatagggatgaatagcaaaacaaggtaatcagaggttttagagctatgctgttttg

SEQ ID NO: 3635 - DNA, 74 bp, Artificial Sequence
  Description of Artificial Sequence: Synthetic oligonucleotide
gaaattaatacgactcactatagggatgaatatatctgaagggcaagtgcaagttttagagctatgctgttttg

SEQ ID NO: 3636 - DNA, 74 bp, Artificial Sequence
  Description of Artificial Sequence: Synthetic oligonucleotide
gaaattaatacgactcactatagggatgaataaaaaacctggcaccttggccgttttagagctatgctgttttg

SEQ ID NO: 3637 - DNA, 74 bp, Artificial Sequence
  Description of Artificial Sequence: Synthetic oligonucleotide
gaaattaatacgactcactatagggatgaatacttctgggagagcgggctgcgttttagagctatgctgttttg

SEQ ID NO: 3638 - DNA, 74 bp, Artificial Sequence
  Description of Artificial Sequence: Synthetic oligonucleotide
gaaattaatacgactcactatagggatgaatacaggtttccataagatgcaagttttagagctatgctgttttg

SEQ ID NO: 3639 - DNA, 74 bp, Artificial Sequence
  Description of Artificial Sequence: Synthetic oligonucleotide
gaaattaatacgactcactatagggatgaataatagtctctctgtcaccagagttttagagctatgctgttttg

SEQ ID NO: 3640 - DNA, 74 bp, Artificial Sequence
  Description of Artificial Sequence: Synthetic oligonucleotide
gaaattaatacgactcactatagggatgaatagttgattatttgctgtcagagttttagagctatgctgttttg

SEQ ID NO: 3641 - DNA, 74 bp, Artificial Sequence
  Description of Artificial Sequence: Synthetic oligonucleotide
gaaattaatacgactcactatagggatgaataaatgatactgtgttggggaggttttagagctatgctgttttg

SEQ ID NO: 3642 - DNA, 74 bp, Artificial Sequence
  Description of Artificial Sequence: Synthetic oligonucleotide
gaaattaatacgactcactatagggatgaatagaaaataatacactttctccgttttagagctatgctgttttg

SEQ ID NO: 3643 - DNA, 74 bp, Artificial Sequence
  Description of Artificial Sequence: Synthetic oligonucleotide
gaaattaatacgactcactatagggatgaataattgaccactcagccaatacgttttagagctatgctgttttg

SEQ ID NO: 3644 - DNA, 74 bp, Artificial Sequence
  Description of Artificial Sequence: Synthetic oligonucleotide
gaaattaatacgactcactatagggatgaatactgtgaatgtatagagccccgttttagagctatgctgttttg

SEQ ID NO: 3645 - DNA, 74 bp, Artificial Sequence
  Description of Artificial Sequence: Synthetic oligonucleotide
gaaattaatacgactcactatagggatgaatagatgctggtggattcaatgggttttagagctatgctgttttg

SEQ ID NO: 3646 - DNA, 74 bp, Artificial Sequence
  Description of Artificial Sequence: Synthetic oligonucleotide
gaaattaatacgactcactatagggatgaataaagtgaaggtattacagtaggttttagagctatgctgttttg

SEQ ID NO: 3647 - DNA, 74 bp, Artificial Sequence
  Description of Artificial Sequence: Synthetic oligonucleotide
gaaattaatacgactcactatagggatgaataaaacatgatgaacatactgcgttttagagctatgctgttttg

SEQ ID NO: 3648 - DNA, 74 bp, Artificial Sequence
  Description of Artificial Sequence: Synthetic oligonucleotide
gaaattaatacgactcactatagggatgaatagcacagagtaggtactccaagttttagagctatgctgttttg

SEQ ID NO: 3649 - DNA, 74 bp, Artificial Sequence
  Description of Artificial Sequence: Synthetic oligonucleotide
gaaattaatacgactcactatagggatgaataaattttttgtgttgtagccagttttagagctatgctgttttg

SEQ ID NO: 3650 - DNA, 74 bp, Artificial Sequence
  Description of Artificial Sequence: Synthetic oligonucleotide
gaaattaatacgactcactatagggatgaataggaagctcctgacattctgggttttagagctatgctgttttg

SEQ ID NO: 3651 - DNA, 74 bp, Artificial Sequence
  Description of Artificial Sequence: Synthetic oligonucleotide
gaaattaatacgactcactatagggatgaataattgtaatggcactgcaggagttttagagctatgctgttttg

SEQ ID NO: 3652 - DNA, 74 bp, Artificial Sequence
  Description of Artificial Sequence: Synthetic oligonucleotide
gaaattaatacgactcactatagggatgaatacagaggactggggtatacaagttttagagctatgctgttttg

SEQ ID NO: 3653 - DNA, 74 bp, Artificial Sequence
  Description of Artificial Sequence: Synthetic oligonucleotide
gaaattaatacgactcactatagggatgaataaggcccagcactcagcatgggttttagagctatgctgttttg

SEQ ID NO: 3654 - DNA, 74 bp, Artificial Sequence
  Description of Artificial Sequence: Synthetic oligonucleotide
gaaattaatacgactcactatagggatgaatattgatctacatttttgccaggttttagagctatgctgttttg

SEQ ID NO: 3655 - DNA, 74 bp, Artificial Sequence
  Description of Artificial Sequence: Synthetic oligonucleotide
gaaattaatacgactcactatagggatgaatatgggaaatggtgacttaaaagttttagagctatgctgttttg

SEQ ID NO: 3656 - DNA, 74 bp, Artificial Sequence
  Description of Artificial Sequence: Synthetic oligonucleotide
gaaattaatacgactcactatagggatgaataaaaactcagccagctgacacgttttagagctatgctgttttg

SEQ ID NO: 3657 - DNA, 74 bp, Artificial Sequence
  Description of Artificial Sequence: Synthetic oligonucleotide
gaaattaatacgactcactatagggatgaatacatacgcttggcaatgagcagttttagagctatgctgttttg

SEQ ID NO: 3658 - DNA, 74 bp, Artificial Sequence
  Description of Artificial Sequence: Synthetic oligonucleotide
gaaattaatacgactcactatagggatgaataagtcttttgtttgctaggaagttttagagctatgctgttttg

SEQ ID NO: 3659 - DNA, 74 bp, Artificial Sequence
  Description of Artificial Sequence: Synthetic oligonucleotide
gaaattaatacgactcactatagggatgaatagagcataggaagcctgcacagttttagagctatgctgttttg

SEQ ID NO: 3660 - DNA, 74 bp, Artificial Sequence
  Description of Artificial Sequence: Synthetic oligonucleotide
gaaattaatacgactcactatagggatgaataacaagactgttttgcccaccgttttagagctatgctgttttg

SEQ ID NO: 3661 - DNA, 74 bp, Artificial Sequence
  Description of Artificial Sequence: Synthetic oligonucleotide
gaaattaatacgactcactatagggatgaatatgagactgctctccttagaagttttagagctatgctgttttg

SEQ ID NO: 3662 - DNA, 74 bp, Artificial Sequence
  Description of Artificial Sequence: Synthetic oligonucleotide
gaaattaatacgactcactatagggatgaatagttagtctcaccctgccaaagttttagagctatgctgttttg

SEQ ID NO: 3663 - DNA, 74 bp, Artificial Sequence
  Description of Artificial Sequence: Synthetic oligonucleotide
gaaattaatacgactcactatagggatgaatatgtgtttcttgtgtgtgcccgttttagagctatgctgttttg

SEQ ID NO: 3664 - DNA, 74 bp, Artificial Sequence
  Description of Artificial Sequence: Synthetic oligonucleotide
gaaattaatacgactcactatagggatgaatatttgtaagtatggctaatacgttttagagctatgctgttttg

SEQ ID NO: 3665 - DNA, 74 bp, Artificial Sequence
  Description of Artificial Sequence: Synthetic oligonucleotide
gaaattaatacgactcactatagggatgaatactagttttaagccccaggaagttttagagctatgctgttttg

SEQ ID NO: 3666 - DNA, 74 bp, Artificial Sequence
  Description of Artificial Sequence: Synthetic oligonucleotide
gaaattaatacgactcactatagggatgaatataggctgttaatagctgaaagttttagagctatgctgttttg

SEQ ID NO: 3667 - DNA, 74 bp, Artificial Sequence
  Description of Artificial Sequence: Synthetic oligonucleotide
gaaattaatacgactcactatagggatgaatattgggggtagagcagcatcggttttagagctatgctgttttg

SEQ ID NO: 3668 - DNA, 74 bp, Artificial Sequence
  Description of Artificial Sequence: Synthetic oligonucleotide
gaaattaatacgactcactatagggatgaatatgtagtcagatatcaagtgagttttagagctatgctgttttg

SEQ ID NO: 3669 - DNA, 74 bp, Artificial Sequence
  Description of Artificial Sequence: Synthetic oligonucleotide
gaaattaatacgactcactatagggatgaatattatttctgagaaaaggtaggttttagagctatgctgttttg

SEQ ID NO: 3670 - DNA, 74 bp, Artificial Sequence
  Description of Artificial Sequence: Synthetic oligonucleotide
gaaattaatacgactcactatagggatgaataataaattctcaataatgagggttttagagctatgctgttttg

SEQ ID NO: 3671 - DNA, 74 bp, Artificial Sequence
  Description of Artificial Sequence: Synthetic oligonucleotide
gaaattaatacgactcactatagggatgaatatcttaaaagcaagacccaaagttttagagctatgctgttttg

SEQ ID NO: 3672 - DNA, 74 bp, Artificial Sequence
  Description of Artificial Sequence: Synthetic oligonucleotide
gaaattaatacgactcactatagggatgaatattacaggtaaagctctcagggttttagagctatgctgttttg

SEQ ID NO: 3673 - DNA, 74 bp, Artificial Sequence
  Description of Artificial Sequence: Synthetic oligonucleotide
gaaattaatacgactcactatagggatgaatactgctgcagtggactccagagttttagagctatgctgttttg

SEQ ID NO: 3674 - DNA, 74 bp, Artificial Sequence
  Description of Artificial Sequence: Synthetic oligonucleotide
gaaattaatacgactcactatagggatgaataatgaagctggcagatcaaaagttttagagctatgctgttttg

SEQ ID NO: 3675 - DNA, 74 bp, Artificial Sequence
  Description of Artificial Sequence: Synthetic oligonucleotide
gaaattaatacgactcactatagggatgaatatcaggcaatgcaaacaaagcgttttagagctatgctgttttg

SEQ ID NO: 3676 - DNA, 74 bp, Artificial Sequence
  Description of Artificial Sequence: Synthetic oligonucleotide
gaaattaatacgactcactatagggatgaatatggcaccaggatagtaacgagttttagagctatgctgttttg

SEQ ID NO: 3677 - DNA, 74 bp, Artificial Sequence
  Description of Artificial Sequence: Synthetic oligonucleotide
gaaattaatacgactcactatagggatgaatatgaagctgtcaccatggcgagttttagagctatgctgttttg

SEQ ID NO: 3678 - DNA, 74 bp, Artificial Sequence
  Description of Artificial Sequence: Synthetic oligonucleotide
gaaattaatacgactcactatagggatgaatagaggtcttggtggacaggacgttttagagctatgctgttttg

SEQ ID NO: 3679 - DNA, 74 bp, Artificial Sequence
  Description of Artificial Sequence: Synthetic oligonucleotide
gaaattaatacgactcactatagggatgaataagacagccaaatgtgaaggggttttagagctatgctgttttg

SEQ ID NO: 3680 - DNA, 74 bp, Artificial Sequence
  Description of Artificial Sequence: Synthetic oligonucleotide
gaaattaatacgactcactatagggatgaatatcttcagggaaagttggagggttttagagctatgctgttttg

SEQ ID NO: 3681 - DNA, 74 bp, Artificial Sequence
  Description of Artificial Sequence: Synthetic oligonucleotide
gaaattaatacgactcactatagggatgaataccagggggagactgctgtccgttttagagctatgctgttttg

SEQ ID NO: 3682 - DNA, 74 bp, Artificial Sequence
  Description of Artificial Sequence: Synthetic oligonucleotide
gaaattaatacgactcactatagggatgaatagaacttcctcctgtggacaagttttagagctatgctgttttg

SEQ ID NO: 3683 - DNA, 74 bp, Artificial Sequence
  Description of Artificial Sequence: Synthetic oligonucleotide
gaaattaatacgactcactatagggatgaataggggctggggtgtatccagagttttagagctatgctgttttg

SEQ ID NO: 3684 - DNA, 74 bp, Artificial Sequence
  Description of Artificial Sequence: Synthetic oligonucleotide
gaaattaatacgactcactatagggatgaataacatgcgggcaaagtgcagcgttttagagctatgctgttttg

SEQ ID NO: 3685 - DNA, 74 bp, Artificial Sequence
  Description of Artificial Sequence: Synthetic oligonucleotide
gaaattaatacgactcactatagggatgaatatgaccaagatgtagaggacagttttagagctatgctgttttg

SEQ ID NO: 3686 - DNA, 74 bp, Artificial Sequence
  Description of Artificial Sequence: Synthetic oligonucleotide
gaaattaatacgactcactatagggatgaataagggggtggtgtctccccaagttttagagctatgctgttttg

SEQ ID NO: 3687 - DNA, 74 bp, Artificial Sequence
  Description of Artificial Sequence: Synthetic oligonucleotide
gaaattaatacgactcactatagggatgaataggagcccacatttcccacgagttttagagctatgctgttttg

SEQ ID NO: 3688 - DNA, 74 bp, Artificial Sequence
  Description of Artificial Sequence: Synthetic oligonucleotide
gaaattaatacgactcactatagggatgaatacctggaatggaccagaagccgttttagagctatgctgttttg

SEQ ID NO: 3689 - DNA, 74 bp, Artificial Sequence
  Description of Artificial Sequence: Synthetic oligonucleotide
gaaattaatacgactcactatagggatgaataggaatgctcttcataggggagttttagagctatgctgttttg

SEQ ID NO: 3690 - DNA, 74 bp, Artificial Sequence
  Description of Artificial Sequence: Synthetic oligonucleotide
gaaattaatacgactcactatagggatgaatagagagggattaatgaagggagttttagagctatgctgttttg

SEQ ID NO: 3691 - DNA, 74 bp, Artificial Sequence
  Description of Artificial Sequence: Synthetic oligonucleotide
gaaattaatacgactcactatagggatgaatagagtgtggtgcgcaggagaggttttagagctatgctgttttg

SEQ ID NO: 3692 - DNA, 74 bp, Artificial Sequence
  Description of Artificial Sequence: Synthetic oligonucleotide
gaaattaatacgactcactatagggatgaatataactttaagctccagaccagttttagagctatgctgttttg

SEQ ID NO: 3693 - DNA, 74 bp, Artificial Sequence
  Description of Artificial Sequence: Synthetic oligonucleotide
gaaattaatacgactcactatagggatgaatatagctctgcaaggccccggggttttagagctatgctgttttg

SEQ ID NO: 3694 - DNA, 74 bp, Artificial Sequence
  Description of Artificial Sequence: Synthetic oligonucleotide
gaaattaatacgactcactatagggatgaatagaattttattataagagtaagttttagagctatgctgttttg

SEQ ID NO: 3695 - DNA, 74 bp, Artificial Sequence
  Description of Artificial Sequence: Synthetic oligonucleotide
gaaattaatacgactcactatagggatgaataactgagatcactttaactccgttttagagctatgctgttttg

SEQ ID NO: 3696 - DNA, 74 bp, Artificial Sequence
  Description of Artificial Sequence: Synthetic oligonucleotide
gaaattaatacgactcactatagggatgaataccattctttacggccggagggttttagagctatgctgttttg

SEQ ID NO: 3697 - DNA, 74 bp, Artificial Sequence
  Description of Artificial Sequence: Synthetic oligonucleotide
gaaattaatacgactcactatagggatgaatatcttggggcgctcccactccgttttagagctatgctgttttg

SEQ ID NO: 3698 - DNA, 74 bp, Artificial Sequence
  Description of Artificial Sequence: Synthetic oligonucleotide
gaaattaatacgactcactatagggatgaatatctctcagaacaggtcccaggttttagagctatgctgttttg

SEQ ID NO: 3699 - DNA, 74 bp, Artificial Sequence
  Description of Artificial Sequence: Synthetic oligonucleotide
gaaattaatacgactcactatagggatgaataactacctccctgaattcaacgttttagagctatgctgttttg

SEQ ID NO: 3700 - DNA, 74 bp, Artificial Sequence
  Description of Artificial Sequence: Synthetic oligonucleotide
gaaattaatacgactcactatagggatgaataaaagacagagaagaggaggagttttagagctatgctgttttg

SEQ ID NO: 3701 - DNA, 74 bp, Artificial Sequence
  Description of Artificial Sequence: Synthetic oligonucleotide
gaaattaatacgactcactatagggatgaatatctagcaggttttggtgcaagttttagagctatgctgttttg

SEQ ID NO: 3702 - DNA, 74 bp, Artificial Sequence
  Description of Artificial Sequence: Synthetic oligonucleotide
gaaattaatacgactcactatagggatgaatacagagtccccagctgtataagttttagagctatgctgttttg

SEQ ID NO: 3703 - DNA, 74 bp, Artificial Sequence
  Description of Artificial Sequence: Synthetic oligonucleotide
gaaattaatacgactcactatagggatgaataagtctaatttgcctttccacgttttagagctatgctgttttg

SEQ ID NO: 3704 - DNA, 74 bp, Artificial Sequence
  Description of Artificial Sequence: Synthetic oligonucleotide
gaaattaatacgactcactatagggatgaataacacatgttatcttgggtgagttttagagctatgctgttttg

SEQ ID NO: 3705 - DNA, 74 bp, Artificial Sequence
  Description of Artificial Sequence: Synthetic oligonucleotide
gaaattaatacgactcactatagggatgaataaattcaactctctgcacccggttttagagctatgctgttttg

SEQ ID NO: 3706 - DNA, 74 bp, Artificial Sequence
  Description of Artificial Sequence: Synthetic oligonucleotide
gaaattaatacgactcactatagggatgaataggggacctgagagaatgagggttttagagctatgctgttttg

SEQ ID NO: 3707 - DNA, 74 bp, Artificial Sequence
  Description of Artificial Sequence: Synthetic oligonucleotide
gaaattaatacgactcactatagggatgaatatgtatagacaaagagcaaaggttttagagctatgctgttttg

SEQ ID NO: 3708 - DNA, 74 bp, Artificial Sequence
  Description of Artificial Sequence: Synthetic oligonucleotide
gaaattaatacgactcactatagggatgaataagtgcagaatacagggaagggttttagagctatgctgttttg

SEQ ID NO: 3709 - DNA, 74 bp, Artificial Sequence
  Description of Artificial Sequence: Synthetic oligonucleotide
gaaattaatacgactcactatagggatgaatagaggatggccatgctccaccgttttagagctatgctgttttg

SEQ ID NO: 3710 - DNA, 74 bp, Artificial Sequence
  Description of Artificial Sequence: Synthetic oligonucleotide
gaaattaatacgactcactatagggatgaataagggtttccttctagggcccgttttagagctatgctgttttg

SEQ ID NO: 3711 - DNA, 74 bp, Artificial Sequence
  Description of Artificial Sequence: Synthetic oligonucleotide
gaaattaatacgactcactatagggatgaatatgagcaggagtgtaagaaaagttttagagctatgctgttttg

SEQ ID NO: 3712 - DNA, 74 bp, Artificial Sequence
  Description of Artificial Sequence: Synthetic oligonucleotide
gaaattaatacgactcactatagggatgaatacaggaatcatctgtggctgcgttttagagctatgctgttttg

SEQ ID NO: 3713 - DNA, 74 bp, Artificial Sequence
  Description of Artificial Sequence: Synthetic oligonucleotide
gaaattaatacgactcactatagggatgaataattctttgaattcatcaagggttttagagctatgctgttttg

SEQ ID NO: 3714 - DNA, 74 bp, Artificial Sequence
  Description of Artificial Sequence: Synthetic oligonucleotide
gaaattaatacgactcactatagggatgaatacaatgtaaatgtcaggagaggttttagagctatgctgttttg

SEQ ID NO: 3715 - DNA, 74 bp, Artificial Sequence
  Description of Artificial Sequence: Synthetic oligonucleotide
gaaattaatacgactcactatagggatgaataaggagagaggacgggaggaagttttagagctatgctgttttg

SEQ ID NO: 3716 - DNA, 74 bp, Artificial Sequence
  Description of Artificial Sequence: Synthetic oligonucleotide
gaaattaatacgactcactatagggatgaataactgcttgccagcctgctaggttttagagctatgctgttttg

SEQ ID NO: 3717 - DNA, 74 bp, Artificial Sequence
  Description of Artificial Sequence: Synthetic oligonucleotide
gaaattaatacgactcactatagggatgaatagctccaatactagcttcccagttttagagctatgctgttttg

SEQ ID NO: 3718 - DNA, 74 bp, Artificial Sequence
  Description of Artificial Sequence: Synthetic oligonucleotide
gaaattaatacgactcactatagggatgaatattgcctacaaggcctggcaagttttagagctatgctgttttg

SEQ ID NO: 3719 - DNA, 74 bp, Artificial Sequence
  Description of Artificial Sequence: Synthetic oligonucleotide
gaaattaatacgactcactatagggatgaatatttccagactcctaaccccagttttagagctatgctgttttg

SEQ ID NO: 3720 - DNA, 74 bp, Artificial Sequence
  Description of Artificial Sequence: Synthetic oligonucleotide
gaaattaatacgactcactatagggatgaatattgaggttgcctccatgcacgttttagagctatgctgttttg

SEQ ID NO: 3721 - DNA, 74 bp, Artificial Sequence
  Description of Artificial Sequence: Synthetic oligonucleotide
gaaattaatacgactcactatagggatgaatacttctggcagctaggaacacgttttagagctatgctgttttg

SEQ ID NO: 3722 - DNA, 74 bp, Artificial Sequence
  Description of Artificial Sequence: Synthetic oligonucleotide
gaaattaatacgactcactatagggatgaatattagataaaaactaggaagagttttagagctatgctgttttg

SEQ ID NO: 3723 - DNA, 74 bp, Artificial Sequence
  Description of Artificial Sequence: Synthetic oligonucleotide
gaaattaatacgactcactatagggatgaatatgtggctttttccatggggcgttttagagctatgctgttttg

SEQ ID NO: 3724 - DNA, 74 bp, Artificial Sequence
  Description of Artificial Sequence: Synthetic oligonucleotide
gaaattaatacgactcactatagggatgaatagtgaacctggaaagatagacgttttagagctatgctgttttg

SEQ ID NO: 3725 - DNA, 74 bp, Artificial Sequence
  Description of Artificial Sequence: Synthetic oligonucleotide
gaaattaatacgactcactatagggatgaataaaaggcacagtagcagggaggttttagagctatgctgttttg

SEQ ID NO: 3726 - DNA, 74 bp, Artificial Sequence
  Description of Artificial Sequence: Synthetic oligonucleotide
gaaattaatacgactcactatagggatgaataaagggggtggaggctacccagttttagagctatgctgttttg

SEQ ID NO: 3727 - DNA, 74 bp, Artificial Sequence
  Description of Artificial Sequence: Synthetic oligonucleotide
gaaattaatacgactcactatagggatgaatacttaggagggatggtgatgggttttagagctatgctgttttg

SEQ ID NO: 3728 - DNA, 74 bp, Artificial Sequence
  Description of Artificial Sequence: Synthetic oligonucleotide
gaaattaatacgactcactatagggatgaataggagccagggatgaggaggagttttagagctatgctgttttg

SEQ ID NO: 3729 - DNA, 74 bp, Artificial Sequence
  Description of Artificial Sequence: Synthetic oligonucleotide
gaaattaatacgactcactatagggatgaataagacgtttaagacattctaggttttagagctatgctgttttg

SEQ ID NO: 3730 - DNA, 74 bp, Artificial Sequence
  Description of Artificial Sequence: Synthetic oligonucleotide
gaaattaatacgactcactatagggatgaataaagcaaggccatagctatccgttttagagctatgctgttttg

SEQ ID NO: 3731 - DNA, 74 bp, Artificial Sequence
  Description of Artificial Sequence: Synthetic oligonucleotide
gaaattaatacgactcactatagggatgaatataatcaattaggtcagcaaagttttagagctatgctgttttg

SEQ ID NO: 3732 - DNA, 74 bp, Artificial Sequence
  Description of Artificial Sequence: Synthetic oligonucleotide
gaaattaatacgactcactatagggatgaatataaaacaggctgatgaaaccgttttagagctatgctgttttg

SEQ ID NO: 3733 - DNA, 74 bp, Artificial Sequence
  Description of Artificial Sequence: Synthetic oligonucleotide
gaaattaatacgactcactatagggatgaataattctaaaggacaaacaaccgttttagagctatgctgttttg

SEQ ID NO: 3734 - DNA, 74 bp, Artificial Sequence
  Description of Artificial Sequence: Synthetic oligonucleotide
gaaattaatacgactcactatagggatgaataaaggatcagcgtgcttggccgttttagagctatgctgttttg

SEQ ID NO: 3735 - DNA, 74 bp, Artificial Sequence
  Description of Artificial Sequence: Synthetic oligonucleotide
gaaattaatacgactcactatagggatgaatacagtagataggtggcaaccagttttagagctatgctgttttg

SEQ ID NO: 3736 - DNA, 74 bp, Artificial Sequence
  Description of Artificial Sequence: Synthetic oligonucleotide
gaaattaatacgactcactatagggatgaatagcacatctccatttctaggggttttagagctatgctgttttg

SEQ ID NO: 3737 - DNA, 74 bp, Artificial Sequence
  Description of Artificial Sequence: Synthetic oligonucleotide
gaaattaatacgactcactatagggatgaatacaaattaccaaaaagcatgggttttagagctatgctgttttg

SEQ ID NO: 3738 - DNA, 74 bp, Artificial Sequence
  Description of Artificial Sequence: Synthetic oligonucleotide
gaaattaatacgactcactatagggatgaatatagaaaagaacatgagataagttttagagctatgctgttttg

SEQ ID NO: 3739 - DNA, 74 bp, Artificial Sequence
  Description of Artificial Sequence: Synthetic oligonucleotide
gaaattaatacgactcactatagggatgaatagggttagatgttggtggaaggttttagagctatgctgttttg

SEQ ID NO: 3740 - DNA, 74 bp, Artificial Sequence
  Description of Artificial Sequence: Synthetic oligonucleotide
gaaattaatacgactcactatagggatgaataaggagctctcatccctgtacgttttagagctatgctgttttg

SEQ ID NO: 3741 - DNA, 74 bp, Artificial Sequence
  Description of Artificial Sequence: Synthetic oligonucleotide
gaaattaatacgactcactatagggatgaatactaggttgcagctgtgcgccgttttagagctatgctgttttg

SEQ ID NO: 3742 - DNA, 74 bp, Artificial Sequence
  Description of Artificial Sequence: Synthetic oligonucleotide
gaaattaatacgactcactatagggatgaataaggggaagggcagtcaatgagttttagagctatgctgttttg

SEQ ID NO: 3743 - DNA, 74 bp, Artificial Sequence
  Description of Artificial Sequence: Synthetic oligonucleotide
gaaattaatacgactcactatagggatgaatatcagtgataggaagaaatgcgttttagagctatgctgttttg

SEQ ID NO: 3744 - DNA, 74 bp, Artificial Sequence
  Description of Artificial Sequence: Synthetic oligonucleotide
gaaattaatacgactcactatagggatgaatatgtgggtatttctcgtcagggttttagagctatgctgttttg

SEQ ID NO: 3745 - DNA, 74 bp, Artificial Sequence
  Description of Artificial Sequence: Synthetic oligonucleotide
gaaattaatacgactcactatagggatgaatatcgactgtcctcaatgctcagttttagagctatgctgttttg

SEQ ID NO: 3746 - DNA, 74 bp, Artificial Sequence
  Description of Artificial Sequence: Synthetic oligonucleotide
gaaattaatacgactcactatagggatgaataggggaatgtgccaggtcagggttttagagctatgctgttttg

SEQ ID NO: 3747 - DNA, 74 bp, Artificial Sequence
  Description of Artificial Sequence: Synthetic oligonucleotide
gaaattaatacgactcactatagggatgaatatctctactcctgccttatacgttttagagctatgctgttttg

SEQ ID NO: 3748 - DNA, 74 bp, Artificial Sequence
  Description of Artificial Sequence: Synthetic oligonucleotide
gaaattaatacgactcactatagggatgaataattaggtgtgcatgttaggggttttagagctatgctgttttg

SEQ ID NO: 3749 - DNA, 74 bp, Artificial Sequence
  Description of Artificial Sequence: Synthetic oligonucleotide
gaaattaatacgactcactatagggatgaataatgattccattacctcccccgttttagagctatgctgttttg

SEQ ID NO: 3750 - DNA, 74 bp, Artificial Sequence
  Description of Artificial Sequence: Synthetic oligonucleotide
gaaattaatacgactcactatagggatgaataatggaatatattgggcaaaagttttagagctatgctgttttg

SEQ ID NO: 3751 - DNA, 74 bp, Artificial Sequence
  Description of Artificial Sequence: Synthetic oligonucleotide
gaaattaatacgactcactatagggatgaatatgaccggcctccctccagacgttttagagctatgctgttttg

SEQ ID NO: 3752 - DNA, 74 bp, Artificial Sequence
  Description of Artificial Sequence: Synthetic oligonucleotide
gaaattaatacgactcactatagggatgaataccttggctggacctggcgccgttttagagctatgctgttttg

SEQ ID NO: 3753 - DNA, 74 bp, Artificial Sequence
  Description of Artificial Sequence: Synthetic oligonucleotide
gaaattaatacgactcactatagggatgaatacaaggcaagggggaagaaaagttttagagctatgctgttttg

SEQ ID NO: 3754 - DNA, 74 bp, Artificial Sequence
  Description of Artificial Sequence: Synthetic oligonucleotide
gaaattaatacgactcactatagggatgaatacgaggctctgcaagagaggggttttagagctatgctgttttg

SEQ ID NO: 3755 - DNA, 74 bp, Artificial Sequence
  Description of Artificial Sequence: Synthetic oligonucleotide
gaaattaatacgactcactatagggatgaatagttggagaaaactgatctgagttttagagctatgctgttttg

SEQ ID NO: 3756 - DNA, 74 bp, Artificial Sequence
  Description of Artificial Sequence: Synthetic oligonucleotide
gaaattaatacgactcactatagggatgaatactaaggcagactcctccgaggttttagagctatgctgttttg

SEQ ID NO: 3757 - DNA, 74 bp, Artificial Sequence
  Description of Artificial Sequence: Synthetic oligonucleotide
gaaattaatacgactcactatagggatgaatataagcctgcgggtatgcagagttttagagctatgctgttttg

SEQ ID NO: 3758 - DNA, 74 bp, Artificial Sequence
  Description of Artificial Sequence: Synthetic oligonucleotide
gaaattaatacgactcactatagggatgaataggaggctgaagagggaagaagttttagagctatgctgttttg

SEQ ID NO: 3759 - DNA, 74 bp, Artificial Sequence
  Description of Artificial Sequence: Synthetic oligonucleotide
gaaattaatacgactcactatagggatgaataaagttttgtggagtaaggaagttttagagctatgctgttttg

SEQ ID NO: 3760 - DNA, 74 bp, Artificial Sequence
  Description of Artificial Sequence: Synthetic oligonucleotide
gaaattaatacgactcactatagggatgaataccatctgtttctggtgatgcgttttagagctatgctgttttg

SEQ ID NO: 3761 - DNA, 74 bp, Artificial Sequence
  Description of Artificial Sequence: Synthetic oligonucleotide
gaaattaatacgactcactatagggatgaataaagtcttctcccgcacctaggttttagagctatgctgttttg

SEQ ID NO: 3762 - DNA, 74 bp, Artificial Sequence
  Description of Artificial Sequence: Synthetic oligonucleotide
gaaattaatacgactcactatagggatgaatactttttgttaccataaataagttttagagctatgctgttttg

SEQ ID NO: 3763 - DNA, 74 bp, Artificial Sequence
  Description of Artificial Sequence: Synthetic oligonucleotide
gaaattaatacgactcactatagggatgaatactgccctcttaccatgcacagttttagagctatgctgttttg

SEQ ID NO: 3764 - DNA, 74 bp, Artificial Sequence
  Description of Artificial Sequence: Synthetic oligonucleotide
gaaattaatacgactcactatagggatgaatactggagccccacccaggagcgttttagagctatgctgttttg

SEQ ID NO: 3765 - DNA, 74 bp, Artificial Sequence
  Description of Artificial Sequence: Synthetic oligonucleotide
gaaattaatacgactcactatagggatgaatatggagtgcattgagtagggcgttttagagctatgctgttttg

SEQ ID NO: 3766 - DNA, 74 bp, Artificial Sequence
  Description of Artificial Sequence: Synthetic oligonucleotide
gaaattaatacgactcactatagggatgaatacatgagtggcctgtgagaccgttttagagctatgctgttttg

SEQ ID NO: 3767 - DNA, 74 bp, Artificial Sequence
  Description of Artificial Sequence: Synthetic oligonucleotide
gaaattaatacgactcactatagggatgaatagctctctggagacttgacgggttttagagctatgctgttttg

SEQ ID NO: 3768 - DNA, 74 bp, Artificial Sequence
  Description of Artificial Sequence: Synthetic oligonucleotide
gaaattaatacgactcactatagggatgaatatgtcctcatcagacctaagcgttttagagctatgctgttttg

SEQ ID NO: 3769 - DNA, 74 bp, Artificial Sequence
  Description of Artificial Sequence: Synthetic oligonucleotide
gaaattaatacgactcactatagggatgaatagtggccctgaaccttgagaagttttagagctatgctgttttg

SEQ ID NO: 3770 - DNA, 74 bp, Artificial Sequence
  Description of Artificial Sequence: Synthetic oligonucleotide
gaaattaatacgactcactatagggatgaataccacatcaagagcagcgtgggttttagagctatgctgttttg

SEQ ID NO: 3771 - DNA, 74 bp, Artificial Sequence
  Description of Artificial Sequence: Synthetic oligonucleotide
gaaattaatacgactcactatagggatgaataggtgcctccaccctgccgccgttttagagctatgctgttttg

SEQ ID NO: 3772 - DNA, 74 bp, Artificial Sequence
  Description of Artificial Sequence: Synthetic oligonucleotide
gaaattaatacgactcactatagggatgaatatcacctggccccagcactgcgttttagagctatgctgttttg

SEQ ID NO: 3773 - DNA, 74 bp, Artificial Sequence
  Description of Artificial Sequence: Synthetic oligonucleotide
gaaattaatacgactcactatagggatgaatacctgtggcagagggttaagggttttagagctatgctgttttg

SEQ ID NO: 3774 - DNA, 74 bp, Artificial Sequence
  Description of Artificial Sequence: Synthetic oligonucleotide
gaaattaatacgactcactatagggatgaatactaagccgttgacaacctcagttttagagctatgctgttttg

SEQ ID NO: 3775 - DNA, 74 bp, Artificial Sequence
  Description of Artificial Sequence: Synthetic oligonucleotide
gaaattaatacgactcactatagggatgaataggggccctcgggaaagccccgttttagagctatgctgttttg

SEQ ID NO: 3776 - DNA, 74 bp, Artificial Sequence
  Description of Artificial Sequence: Synthetic oligonucleotide
gaaattaatacgactcactatagggatgaatattgatttcctgtgtgggaaggttttagagctatgctgttttg

SEQ ID NO: 3777 - DNA, 74 bp, Artificial Sequence
  Description of Artificial Sequence: Synthetic oligonucleotide
gaaattaatacgactcactatagggatgaatagggcccaggcagggcccggcgttttagagctatgctgttttg

SEQ ID NO: 3778 - DNA, 74 bp, Artificial Sequence
  Description of Artificial Sequence: Synthetic oligonucleotide
gaaattaatacgactcactatagggatgaatattatggcgggtgggggcaccgttttagagctatgctgttttg

SEQ ID NO: 3779 - DNA, 74 bp, Artificial Sequence
  Description of Artificial Sequence: Synthetic oligonucleotide
gaaattaatacgactcactatagggatgaatagtggagagcagacagagagcgttttagagctatgctgttttg

SEQ ID NO: 3780 - DNA, 74 bp, Artificial Sequence
  Description of Artificial Sequence: Synthetic oligonucleotide
gaaattaatacgactcactatagggatgaatacggggcctgtctccagaggggttttagagctatgctgttttg

SEQ ID NO: 3781 - DNA, 74 bp, Artificial Sequence
  Description of Artificial Sequence: Synthetic oligonucleotide
gaaattaatacgactcactatagggatgaataccgaccaggggcggttctgagttttagagctatgctgttttg

SEQ ID NO: 3782 - DNA, 74 bp, Artificial Sequence
  Description of Artificial Sequence: Synthetic oligonucleotide
gaaattaatacgactcactatagggatgaatatgaggggatgagatgggcacgttttagagctatgctgttttg

SEQ ID NO: 3783 - DNA, 74 bp, Artificial Sequence
  Description of Artificial Sequence: Synthetic oligonucleotide
gaaattaatacgactcactatagggatgaataacggccacatgctgctcaaagttttagagctatgctgttttg

SEQ ID NO: 3784 - DNA, 74 bp, Artificial Sequence
  Description of Artificial Sequence: Synthetic oligonucleotide
gaaattaatacgactcactatagggatgaataatggagctcacaaagtaggcgttttagagctatgctgttttg

SEQ ID NO: 3785 - DNA, 74 bp, Artificial Sequence
  Description of Artificial Sequence: Synthetic oligonucleotide
gaaattaatacgactcactatagggatgaatagtgggccgactgacccacacgttttagagctatgctgttttg

SEQ ID NO: 3786 - DNA, 74 bp, Artificial Sequence
  Description of Artificial Sequence: Synthetic oligonucleotide
gaaattaatacgactcactatagggatgaatacaacatggtgactcaggtgcgttttagagctatgctgttttg

SEQ ID NO: 3787 - DNA, 74 bp, Artificial Sequence
  Description of Artificial Sequence: Synthetic oligonucleotide
gaaattaatacgactcactatagggatgaatacaaaaaaggttctgttcaacgttttagagctatgctgttttg

SEQ ID NO: 3788 - DNA, 74 bp, Artificial Sequence
  Description of Artificial Sequence: Synthetic oligonucleotide
gaaattaatacgactcactatagggatgaatatctctcattcagggagcagggttttagagctatgctgttttg

SEQ ID NO: 3789 - DNA, 74 bp, Artificial Sequence
  Description of Artificial Sequence: Synthetic oligonucleotide
gaaattaatacgactcactatagggatgaataatgcacgagctggtggccgcgttttagagctatgctgttttg

SEQ ID NO: 3790 - DNA, 74 bp, Artificial Sequence
  Description of Artificial Sequence: Synthetic oligonucleotide
gaaattaatacgactcactatagggatgaatattggagatggaggattgggggttttagagctatgctgttttg

SEQ ID NO: 3791 - DNA, 74 bp, Artificial Sequence
  Description of Artificial Sequence: Synthetic oligonucleotide
gaaattaatacgactcactatagggatgaatagagtctcaggcaagaaaccagttttagagctatgctgttttg

SEQ ID NO: 3792 - DNA, 74 bp, Artificial Sequence
  Description of Artificial Sequence: Synthetic oligonucleotide
gaaattaatacgactcactatagggatgaatagctggaaactaagcagatacgttttagagctatgctgttttg

SEQ ID NO: 3793 - DNA, 74 bp, Artificial Sequence
  Description of Artificial Sequence: Synthetic oligonucleotide
gaaattaatacgactcactatagggatgaataaagacaagtgacaggggcaagttttagagctatgctgttttg

SEQ ID NO: 3794 - DNA, 74 bp, Artificial Sequence
  Description of Artificial Sequence: Synthetic oligonucleotide
gaaattaatacgactcactatagggatgaatagaggagatcaagcccagcaagttttagagctatgctgttttg

SEQ ID NO: 3795 - DNA, 74 bp, Artificial Sequence
  Description of Artificial Sequence: Synthetic oligonucleotide
gaaattaatacgactcactatagggatgaatagagtgagtgttgccaccaacgttttagagctatgctgttttg

SEQ ID NO: 3796 - DNA, 74 bp, Artificial Sequence
  Description of Artificial Sequence: Synthetic oligonucleotide
gaaattaatacgactcactatagggatgaataaggaagcagttgccttccgggttttagagctatgctgttttg

SEQ ID NO: 3797 - DNA, 74 bp, Artificial Sequence
  Description of Artificial Sequence: Synthetic oligonucleotide
gaaattaatacgactcactatagggatgaataaaaaaatgatcttgatctccgttttagagctatgctgttttg

SEQ ID NO: 3798 - DNA, 80 bp, Artificial Sequence
  Description of Artificial Sequence: Synthetic oligonucleotide
tgtatgggccgcgctaagtctgtatgccgagcggttcagtaatggatgtggctaccctgacaagccggtcgcaactatgc

SEQ ID NO: 3799 - DNA, 80 bp, Artificial Sequence
  Description of Artificial Sequence: Synthetic oligonucleotide
tgtatgggccgcgctaagtctgtatgccgagcggttcagtaccatggaacctgaatcccacaagccggtcgcaactatgc

SEQ ID NO: 3800 - DNA, 80 bp, Artificial Sequence
  Description of Artificial Sequence: Synthetic oligonucleotide
tgtatgggccgcgctaagtctgtatgccgagcggttcagtcatacggttggacagatggccaagccggtcgcaactatgc

SEQ ID NO: 3801 - DNA, 80 bp, Artificial Sequence
  Description of Artificial Sequence: Synthetic oligonucleotide
tgtatgggccgcgctaagtctgtatgccgagcggttcagtcatgcataccagctggacggcaagccggtcgcaactatgc

SEQ ID NO: 3802 - DNA, 80 bp, Artificial Sequence
  Description of Artificial Sequence: Synthetic oligonucleotide
tgtatgggccgcgctaagtctgtatgccgagcggttcagttttgtggtcgttctcctcctcaagccggtcgcaactatgc

SEQ ID NO: 3803 - DNA, 80 bp, Artificial Sequence
  Description of Artificial Sequence: Synthetic oligonucleotide
tgtatgggccgcgctaagtctgtatgccgagcggttcagtggtcatccatgggcgctttccaagccggtcgcaactatgc

SEQ ID NO: 3804 - DNA, 80 bp, Artificial Sequence
  Description of Artificial Sequence: Synthetic oligonucleotide
tgtatgggccgcgctaagtctgtatgccgagcggttcagtgctccatgctaaaggccaaacaagccggtcgcaactatgc

SEQ ID NO: 3805 - DNA, 80 bp, Artificial Sequence
  Description of Artificial Sequence: Synthetic oligonucleotide
tgtatgggccgcgctaagtctgtatgccgagcggttcagtccacccagacttgcaacctacaagccggtcgcaactatgc

SEQ ID NO: 3806 - DNA, 80 bp, Artificial Sequence
  Description of Artificial Sequence: Synthetic oligonucleotide
tgtatgggccgcgctaagtctgtatgccgagcggttcagttttcatagcgcaaagcaggtcaagccggtcgcaactatgc

SEQ ID NO: 3807 - DNA, 80 bp, Artificial Sequence
  Description of Artificial Sequence: Synthetic oligonucleotide
tgtatgggccgcgctaagtctgtatgccgagcggttcagttgaaacttgccaagcctgctcaagccggtcgcaactatgc

SEQ ID NO: 3808 - DNA, 80 bp, Artificial Sequence
  Description of Artificial Sequence: Synthetic oligonucleotide
tgtatgggccgcgctaagtctgtatgccgagcggttcagtcaagaaggcggagggtttgccaagccggtcgcaactatgc

SEQ ID NO: 3809 - DNA, 80 bp, Artificial Sequence
  Description of Artificial Sequence: Synthetic oligonucleotide
tgtatgggccgcgctaagtctgtatgccgagcggttcagtgaaaatgcagccccgtctttcaagccggtcgcaactatgc

SEQ ID NO: 3810 - DNA, 80 bp, Artificial Sequence
  Description of Artificial Sequence: Synthetic oligonucleotide
tgtatgggccgcgctaagtctgtatgccgagcggttcagtacaatggtgagtgggactgacaagccggtcgcaactatgc

SEQ ID NO: 3811 - DNA, 80 bp, Artificial Sequence
  Description of Artificial Sequence: Synthetic oligonucleotide
tgtatgggccgcgctaagtctgtatgccgagcggttcagttctcagggtggatcaggccacaagccggtcgcaactatgc

SEQ ID NO: 3812 - DNA, 80 bp, Artificial Sequence
  Description of Artificial Sequence: Synthetic oligonucleotide
tgtatgggccgcgctaagtctgtatgccgagcggttcagtccaagcacaattccaccacacaagccggtcgcaactatgc

SEQ ID NO: 3813 - DNA, 80 bp, Artificial Sequence
  Description of Artificial Sequence: Synthetic oligonucleotide
tgtatgggccgcgctaagtctgtatgccgagcggttcagttggcactgttctggcttagacaagccggtcgcaactatgc

SEQ ID NO: 3814 - DNA, 80 bp, Artificial Sequence
  Description of Artificial Sequence: Synthetic oligonucleotide
tgtatgggccgcgctaagtctgtatgccgagcggttcagtacttgcacaattccagccttcaagccggtcgcaactatgc

SEQ ID NO: 3815 - DNA, 80 bp, Artificial Sequence
  Description of Artificial Sequence: Synthetic oligonucleotide
tgtatgggccgcgctaagtctgtatgccgagcggttcagttcctggggacccaacgatgccaagccggtcgcaactatgc

SEQ ID NO: 3816 - DNA, 80 bp, Artificial Sequence
  Description of Artificial Sequence: Synthetic oligonucleotide
tgtatgggccgcgctaagtctgtatgccgagcggttcagtaagtacgtgagccagttccacaagccggtcgcaactatgc

SEQ ID NO: 3817 - DNA, 80 bp, Artificial Sequence
  Description of Artificial Sequence: Synthetic oligonucleotide
tgtatgggccgcgctaagtctgtatgccgagcggttcagttactctgagaattggccccacaagccggtcgcaactatgc

SEQ ID NO: 3818 - DNA, 80 bp, Artificial Sequence
  Description of Artificial Sequence: Synthetic oligonucleotide
tgtatgggccgcgctaagtctgtatgccgagcggttcagtcccaaggctagggttgtagccaagccggtcgcaactatgc

SEQ ID NO: 3819 - DNA, 80 bp, Artificial Sequence
  Description of Artificial Sequence: Synthetic oligonucleotide
tgtatgggccgcgctaagtctgtatgccgagcggttcagtagcctcgtcctctgattccacaagccggtcgcaactatgc

SEQ ID NO: 3820 - DNA, 80 bp, Artificial Sequence
  Description of Artificial Sequence: Synthetic oligonucleotide
tgtatgggccgcgctaagtctgtatgccgagcggttcagtagcactagcagaggacagagcaagccggtcgcaactatgc

SEQ ID NO: 3821 - DNA, 80 bp, Artificial Sequence
  Description of Artificial Sequence: Synthetic oligonucleotide
tgtatgggccgcgctaagtctgtatgccgagcggttcagtaactagtgggagctgtggaacaagccggtcgcaactatgc

SEQ ID NO: 3822 - DNA, 80 bp, Artificial Sequence
  Description of Artificial Sequence: Synthetic oligonucleotide
tgtatgggccgcgctaagtctgtatgccgagcggttcagtcctgggaaaagccgtctcttcaagccggtcgcaactatgc

SEQ ID NO: 3823 - DNA, 80 bp, Artificial Sequence
  Description of Artificial Sequence: Synthetic oligonucleotide
tgtatgggccgcgctaagtctgtatgccgagcggttcagttggttccgttccactgcttccaagccggtcgcaactatgc

SEQ ID NO: 3824 - DNA, 80 bp, Artificial Sequence
  Description of Artificial Sequence: Synthetic oligonucleotide
tgtatgggccgcgctaagtctgtatgccgagcggttcagtagcatttgactggtagcagccaagccggtcgcaactatgc

SEQ ID NO: 3825 - DNA, 80 bp, Artificial Sequence
  Description of Artificial Sequence: Synthetic oligonucleotide
tgtatgggccgcgctaagtctgtatgccgagcggttcagtttccacatggctctccaactcaagccggtcgcaactatgc

SEQ ID NO: 3826 - DNA, 80 bp, Artificial Sequence
  Description of Artificial Sequence: Synthetic oligonucleotide
tgtatgggccgcgctaagtctgtatgccgagcggttcagtaacagagaggatccaacccccaagccggtcgcaactatgc

SEQ ID NO: 3827 - DNA, 80 bp, Artificial Sequence
  Description of Artificial Sequence: Synthetic oligonucleotide
tgtatgggccgcgctaagtctgtatgccgagcggttcagtgagtggtgataatgcgctgccaagccggtcgcaactatgc

SEQ ID NO: 3828 - DNA, 80 bp, Artificial Sequence
  Description of Artificial Sequence: Synthetic oligonucleotide
tgtatgggccgcgctaagtctgtatgccgagcggttcagtctaggcctccccagtgaaggcaagccggtcgcaactatgc

SEQ ID NO: 3829 - DNA, 80 bp, Artificial Sequence
  Description of Artificial Sequence: Synthetic oligonucleotide
tgtatgggccgcgctaagtctgtatgccgagcggttcagtccagggcaggactatcaggccaagccggtcgcaactatgc

SEQ ID NO: 3830 - DNA, 80 bp, Artificial Sequence
  Description of Artificial Sequence: Synthetic oligonucleotide
tgtatgggccgcgctaagtctgtatgccgagcggttcagtagccaggcattccaataggtcaagccggtcgcaactatgc

SEQ ID NO: 3831 - DNA, 80 bp, Artificial Sequence
  Description of Artificial Sequence: Synthetic oligonucleotide
tgtatgggccgcgctaagtctgtatgccgagcggttcagtagagtcactgtgggagagtgcaagccggtcgcaactatgc

SEQ ID NO: 3832 - DNA, 80 bp, Artificial Sequence
  Description of Artificial Sequence: Synthetic oligonucleotide
tgtatgggccgcgctaagtctgtatgccgagcggttcagtcctgctggagttggtgtaaccaagccggtcgcaactatgc

SEQ ID NO: 3833 - DNA, 80 bp, Artificial Sequence
  Description of Artificial Sequence: Synthetic oligonucleotide
tgtatgggccgcgctaagtctgtatgccgagcggttcagtcctggctggactgtactgagcaagccggtcgcaactatgc

SEQ ID NO: 3834 - DNA, 80 bp, Artificial Sequence
  Description of Artificial Sequence: Synthetic oligonucleotide
tgtatgggccgcgctaagtctgtatgccgagcggttcagtttgatgagactggccagaggcaagccggtcgcaactatgc

SEQ ID NO: 3835 - DNA, 80 bp, Artificial Sequence
  Description of Artificial Sequence: Synthetic oligonucleotide
tgtatgggccgcgctaagtctgtatgccgagcggttcagtatccccagatcccagtgcagcaagccggtcgcaactatgc

SEQ ID NO: 3836 - DNA, 80 bp, Artificial Sequence
  Description of Artificial Sequence: Synthetic oligonucleotide
tgtatgggccgcgctaagtctgtatgccgagcggttcagtttgtggcaagatctctgtgccaagccggtcgcaactatgc

SEQ ID NO: 3837 - DNA, 80 bp, Artificial Sequence
  Description of Artificial Sequence: Synthetic oligonucleotide
tgtatgggccgcgctaagtctgtatgccgagcggttcagtcccattcaatagcccttgcccaagccggtcgcaactatgc

SEQ ID NO: 3838 - DNA, 80 bp, Artificial Sequence
  Description of Artificial Sequence: Synthetic oligonucleotide
tgtatgggccgcgctaagtctgtatgccgagcggttcagttaggggagcactagagcactcaagccggtcgcaactatgc

SEQ ID NO: 3839 - DNA, 80 bp, Artificial Sequence
  Description of Artificial Sequence: Synthetic oligonucleotide
tgtatgggccgcgctaagtctgtatgccgagcggttcagtgaggccctatagtacccaggcaagccggtcgcaactatgc

SEQ ID NO: 3840 - DNA, 80 bp, Artificial Sequence
  Description of Artificial Sequence: Synthetic oligonucleotide
tgtatgggccgcgctaagtctgtatgccgagcggttcagtcccagtggcaaagggtagctcaagccggtcgcaactatgc

SEQ ID NO: 3841 - DNA, 80 bp, Artificial Sequence
  Description of Artificial Sequence: Synthetic oligonucleotide
tgtatgggccgcgctaagtctgtatgccgagcggttcagtctactgtgggcattgtagcccaagccggtcgcaactatgc

SEQ ID NO: 3842 - DNA, 80 bp, Artificial Sequence
  Description of Artificial Sequence: Synthetic oligonucleotide
tgtatgggccgcgctaagtctgtatgccgagcggttcagtaagcaggagtgaggattcctcaagccggtcgcaactatgc

SEQ ID NO: 3843 - DNA, 80 bp, Artificial Sequence
  Description of Artificial Sequence: Synthetic oligonucleotide
tgtatgggccgcgctaagtctgtatgccgagcggttcagttgcatcctgaagcccgtttgcaagccggtcgcaactatgc

SEQ ID NO: 3844 - DNA, 80 bp, Artificial Sequence
  Description of Artificial Sequence: Synthetic oligonucleotide
tgtatgggccgcgctaagtctgtatgccgagcggttcagtacaggcgtgtgttgggtaaacaagccggtcgcaactatgc

SEQ ID NO: 3845 - DNA, 80 bp, Artificial Sequence
  Description of Artificial Sequence: Synthetic oligonucleotide
tgtatgggccgcgctaagtctgtatgccgagcggttcagtagtgagtagggaggcagttgcaagccggtcgcaactatgc

SEQ ID NO: 3846 - DNA, 80 bp, Artificial Sequence
  Description of Artificial Sequence: Synthetic oligonucleotide
tgtatgggccgcgctaagtctgtatgccgagcggttcagtaatgtccatccctaggtgcacaagccggtcgcaactatgc

SEQ ID NO: 3847 - DNA, 80 bp, Artificial Sequence
  Description of Artificial Sequence: Synthetic oligonucleotide
tgtatgggccgcgctaagtctgtatgccgagcggttcagttgtaggaatggatgcaggcccaagccggtcgcaactatgc

SEQ ID NO: 3848 - DNA, 80 bp, Artificial Sequence
  Description of Artificial Sequence: Synthetic oligonucleotide
tgtatgggccgcgctaagtctgtatgccgagcggttcagtggcctatggtaatgcctcctcaagccggtcgcaactatgc

SEQ ID NO: 3849 - DNA, 80 bp, Artificial Sequence
  Description of Artificial Sequence: Synthetic oligonucleotide
tgtatgggccgcgctaagtctgtatgccgagcggttcagttggcggggcaatgaagaggtcaagccggtcgcaactatgc

SEQ ID NO: 3850 - DNA, 80 bp, Artificial Sequence
  Description of Artificial Sequence: Synthetic oligonucleotide
tgtatgggccgcgctaagtctgtatgccgagcggttcagtctctggggaccgtgcttttgcaagccggtcgcaactatgc

SEQ ID NO: 3851 - DNA, 80 bp, Artificial Sequence
  Description of Artificial Sequence: Synthetic oligonucleotide
tgtatgggccgcgctaagtctgtatgccgagcggttcagtccaaaggctcagggcagatccaagccggtcgcaactatgc

SEQ ID NO: 3852 - DNA, 80 bp, Artificial Sequence
  Description of Artificial Sequence: Synthetic oligonucleotide
tgtatgggccgcgctaagtctgtatgccgagcggttcagtaatcagtctgctcctctccccaagccggtcgcaactatgc

SEQ ID NO: 3853 - DNA, 80 bp, Artificial Sequence
  Description of Artificial Sequence: Synthetic oligonucleotide
tgtatgggccgcgctaagtctgtatgccgagcggttcagtccaggacggcatgcccattgcaagccggtcgcaactatgc

SEQ ID NO: 3854 - DNA, 80 bp, Artificial Sequence
  Description of Artificial Sequence: Synthetic oligonucleotide
tgtatgggccgcgctaagtctgtatgccgagcggttcagttgagatccagtgtctgctcccaagccggtcgcaactatgc

SEQ ID NO: 3855 - DNA, 80 bp, Artificial Sequence
  Description of Artificial Sequence: Synthetic oligonucleotide
tgtatgggccgcgctaagtctgtatgccgagcggttcagtgcttcattctcttgagcggccaagccggtcgcaactatgc

SEQ ID NO: 3856 - DNA, 80 bp, Artificial Sequence
  Description of Artificial Sequence: Synthetic oligonucleotide
tgtatgggccgcgctaagtctgtatgccgagcggttcagtggtctttctgaaaccccacgcaagccggtcgcaactatgc

SEQ ID NO: 3857 - DNA, 80 bp, Artificial Sequence
  Description of Artificial Sequence: Synthetic oligonucleotide
tgtatgggccgcgctaagtctgtatgccgagcggttcagtccaattctgatcctgggcagcaagccggtcgcaactatgc

SEQ ID NO: 3858 - DNA, 80 bp, Artificial Sequence
  Description of Artificial Sequence: Synthetic oligonucleotide
tgtatgggccgcgctaagtctgtatgccgagcggttcagtccttggttcgactttaggcccaagccggtcgcaactatgc

SEQ ID NO: 3859 - DNA, 80 bp, Artificial Sequence
  Description of Artificial Sequence: Synthetic oligonucleotide
tgtatgggccgcgctaagtctgtatgccgagcggttcagttactaggcaggtaagcagggcaagccggtcgcaactatgc

SEQ ID NO: 3860 - DNA, 80 bp, Artificial Sequence
  Description of Artificial Sequence: Synthetic oligonucleotide
tgtatgggccgcgctaagtctgtatgccgagcggttcagtgggatccaactgacctccagcaagccggtcgcaactatgc

SEQ ID NO: 3861 - DNA, 80 bp, Artificial Sequence
  Description of Artificial Sequence: Synthetic oligonucleotide
tgtatgggccgcgctaagtctgtatgccgagcggttcagtcaaccacccctagtgacagtcaagccggtcgcaactatgc

SEQ ID NO: 3862 - DNA, 80 bp, Artificial Sequence
  Description of Artificial Sequence: Synthetic oligonucleotide
tgtatgggccgcgctaagtctgtatgccgagcggttcagtgccccttactcggaagtacgcaagccggtcgcaactatgc

SEQ ID NO: 3863 - DNA, 80 bp, Artificial Sequence
  Description of Artificial Sequence: Synthetic oligonucleotide
tgtatgggccgcgctaagtctgtatgccgagcggttcagttaggaggggactttcacgttcaagccggtcgcaactatgc

SEQ ID NO: 3864 - DNA, 80 bp, Artificial Sequence
  Description of Artificial Sequence: Synthetic oligonucleotide
tgtatgggccgcgctaagtctgtatgccgagcggttcagtctagacagtgcagcaagtggcaagccggtcgcaactatgc

SEQ ID NO: 3865 - DNA, 80 bp, Artificial Sequence
  Description of Artificial Sequence: Synthetic oligonucleotide
tgtatgggccgcgctaagtctgtatgccgagcggttcagtcattaggcctcaccgttgtccaagccggtcgcaactatgc

SEQ ID NO: 3866 - DNA, 80 bp, Artificial Sequence
  Description of Artificial Sequence: Synthetic oligonucleotide
tgtatgggccgcgctaagtctgtatgccgagcggttcagtatgcgaaacacccggaacaccaagccggtcgcaactatgc

SEQ ID NO: 3867 - DNA, 80 bp, Artificial Sequence
  Description of Artificial Sequence: Synthetic oligonucleotide
tgtatgggccgcgctaagtctgtatgccgagcggttcagtagggtgacaaaggcgccagacaagccggtcgcaactatgc

SEQ ID NO: 3868 - DNA, 80 bp, Artificial Sequence
  Description of Artificial Sequence: Synthetic oligonucleotide
tgtatgggccgcgctaagtctgtatgccgagcggttcagttcgtcgttcttgggcaccaacaagccggtcgcaactatgc

SEQ ID NO: 3869 - DNA, 80 bp, Artificial Sequence
  Description of Artificial Sequence: Synthetic oligonucleotide
tgtatgggccgcgctaagtctgtatgccgagcggttcagtctgggtagcggtccagcgtacaagccggtcgcaactatgc

SEQ ID NO: 3870 - DNA, 80 bp, Artificial Sequence
  Description of Artificial Sequence: Synthetic oligonucleotide
tgtatgggccgcgctaagtctgtatgccgagcggttcagtagaacgctgaacatggaccacaagccggtcgcaactatgc

SEQ ID NO: 3871 - DNA, 80 bp, Artificial Sequence
  Description of Artificial Sequence: Synthetic oligonucleotide
tgtatgggccgcgctaagtctgtatgccgagcggttcagtcagcatccccaatcccaaatcaagccggtcgcaactatgc

SEQ ID NO: 3872 - DNA, 80 bp, Artificial Sequence
  Description of Artificial Sequence: Synthetic oligonucleotide
tgtatgggccgcgctaagtctgtatgccgagcggttcagtcgagaggcaccttcagctcgcaagccggtcgcaactatgc

SEQ ID NO: 3873 - DNA, 80 bp, Artificial Sequence
  Description of Artificial Sequence: Synthetic oligonucleotide
tgtatgggccgcgctaagtctgtatgccgagcggttcagtcgtgctgctcccgacactgccaagccggtcgcaactatgc

SEQ ID NO: 3874 - DNA, 80 bp, Artificial Sequence
  Description of Artificial Sequence: Synthetic oligonucleotide
tgtatgggccgcgctaagtctgtatgccgagcggttcagttgtctggagagaggaacacccaagccggtcgcaactatgc

SEQ ID NO: 3875 - DNA, 80 bp, Artificial Sequence
  Description of Artificial Sequence: Synthetic oligonucleotide
tgtatgggccgcgctaagtctgtatgccgagcggttcagtttaatggcgctctcccagcccaagccggtcgcaactatgc

SEQ ID NO: 3876 - DNA, 80 bp, Artificial Sequence
  Description of Artificial Sequence: Synthetic oligonucleotide
tgtatgggccgcgctaagtctgtatgccgagcggttcagtaaccttcaaagccgcagagtcaagccggtcgcaactatgc

SEQ ID NO: 3877 - DNA, 80 bp, Artificial Sequence
  Description of Artificial Sequence: Synthetic oligonucleotide
tgtatgggccgcgctaagtctgtatgccgagcggttcagttcctggctcgattctcctgccaagccggtcgcaactatgc

SEQ ID NO: 3878 - DNA, 80 bp, Artificial Sequence
  Description of Artificial Sequence: Synthetic oligonucleotide
tgtatgggccgcgctaagtctgtatgccgagcggttcagtagtgtatcacctcagctgcccaagccggtcgcaactatgc

SEQ ID NO: 3879 - DNA, 80 bp, Artificial Sequence
  Description of Artificial Sequence: Synthetic oligonucleotide
tgtatgggccgcgctaagtctgtatgccgagcggttcagtactgatcacaggagcaggagcaagccggtcgcaactatgc

SEQ ID NO: 3880 - DNA, 80 bp, Artificial Sequence
  Description of Artificial Sequence: Synthetic oligonucleotide
tgtatgggccgcgctaagtctgtatgccgagcggttcagtaatgtgtggttggttcagggcaagccggtcgcaactatgc

SEQ ID NO: 3881 - DNA, 80 bp, Artificial Sequence
  Description of Artificial Sequence: Synthetic oligonucleotide
tgtatgggccgcgctaagtctgtatgccgagcggttcagttgagtcatgagtgcttgggccaagccggtcgcaactatgc

SEQ ID NO: 3882 - DNA, 80 bp, Artificial Sequence
  Description of Artificial Sequence: Synthetic oligonucleotide
tgtatgggccgcgctaagtctgtatgccgagcggttcagtaagcacccaagggaagacctcaagccggtcgcaactatgc

SEQ ID NO: 3883 - DNA, 80 bp, Artificial Sequence
  Description of Artificial Sequence: Synthetic oligonucleotide
tgtatgggccgcgctaagtctgtatgccgagcggttcagttctgtccttgcttcacggaacaagccggtcgcaactatgc

SEQ ID NO: 3884 - DNA, 80 bp, Artificial Sequence
  Description of Artificial Sequence: Synthetic oligonucleotide
tgtatgggccgcgctaagtctgtatgccgagcggttcagtccaagaacctgttcggggagcaagccggtcgcaactatgc

SEQ ID NO: 3885 - DNA, 80 bp, Artificial Sequence
  Description of Artificial Sequence: Synthetic oligonucleotide
tgtatgggccgcgctaagtctgtatgccgagcggttcagtaccactacttcaaccctgggcaagccggtcgcaactatgc

SEQ ID NO: 3886 - DNA, 80 bp, Artificial Sequence
  Description of Artificial Sequence: Synthetic oligonucleotide
tgtatgggccgcgctaagtctgtatgccgagcggttcagtgcattcagcacctgggttaacaagccggtcgcaactatgc

SEQ ID NO: 3887 - DNA, 80 bp, Artificial Sequence
  Description of Artificial Sequence: Synthetic oligonucleotide
tgtatgggccgcgctaagtctgtatgccgagcggttcagttgctgggtaatgagcagactcaagccggtcgcaactatgc

SEQ ID NO: 3888 - DNA, 80 bp, Artificial Sequence
  Description of Artificial Sequence: Synthetic oligonucleotide
tgtatgggccgcgctaagtctgtatgccgagcggttcagttgagaatgcacccagagtgacaagccggtcgcaactatgc

SEQ ID NO: 3889 - DNA, 80 bp, Artificial Sequence
  Description of Artificial Sequence: Synthetic oligonucleotide
tgtatgggccgcgctaagtctgtatgccgagcggttcagttccatgccagatccttgtcacaagccggtcgcaactatgc

SEQ ID NO: 3890 - DNA, 80 bp, Artificial Sequence
  Description of Artificial Sequence: Synthetic oligonucleotide
tgtatgggccgcgctaagtctgtatgccgagcggttcagtgggcaatgtcttagagtggccaagccggtcgcaactatgc

SEQ ID NO: 3891 - DNA, 80 bp, Artificial Sequence
  Description of Artificial Sequence: Synthetic oligonucleotide
tgtatgggccgcgctaagtctgtatgccgagcggttcagtctagtggtgacagctacccacaagccggtcgcaactatgc

SEQ ID NO: 3892 - DNA, 80 bp, Artificial Sequence
  Description of Artificial Sequence: Synthetic oligonucleotide
tgtatgggccgcgctaagtctgtatgccgagcggttcagtcacgagggcggaacatctgacaagccggtcgcaactatgc

SEQ ID NO: 3893 - DNA, 80 bp, Artificial Sequence
  Description of Artificial Sequence: Synthetic oligonucleotide
tgtatgggccgcgctaagtctgtatgccgagcggttcagtccacagcataacccacctggcaagccggtcgcaactatgc

SEQ ID NO: 3894 - DNA, 80 bp, Artificial Sequence
  Description of Artificial Sequence: Synthetic oligonucleotide
tgtatgggccgcgctaagtctgtatgccgagcggttcagtttcatccagtagctgtggcacaagccggtcgcaactatgc

SEQ ID NO: 3895 - DNA, 80 bp, Artificial Sequence
  Description of Artificial Sequence: Synthetic oligonucleotide
tgtatgggccgcgctaagtctgtatgccgagcggttcagtagggtcaggtaggaagctttcaagccggtcgcaactatgc

SEQ ID NO: 3896 - DNA, 80 bp, Artificial Sequence
  Description of Artificial Sequence: Synthetic oligonucleotide
tgtatgggccgcgctaagtcagccggttcgtcaagtagcaggcaacgcaccaactcaccccaagccggtcgcaactatgc

SEQ ID NO: 3897 - DNA, 80 bp, Artificial Sequence
  Description of Artificial Sequence: Synthetic oligonucleotide
tgtatgggccgcgctaagtcagccggttcgtcaagtagcactggagacaggggaacttgacaagccggtcgcaactatgc

SEQ ID NO: 3898 - DNA, 80 bp, Artificial Sequence
  Description of Artificial Sequence: Synthetic oligonucleotide
tgtatgggccgcgctaagtcagccggttcgtcaagtagcatcatgttgtgcttggcttgtcaagccggtcgcaactatgc

SEQ ID NO: 3899 - DNA, 80 bp, Artificial Sequence
  Description of Artificial Sequence: Synthetic oligonucleotide
tgtatgggccgcgctaagtcagccggttcgtcaagtagcattttgcatgactctgagccccaagccggtcgcaactatgc

SEQ ID NO: 3900 - DNA, 80 bp, Artificial Sequence
  Description of Artificial Sequence: Synthetic oligonucleotide
tgtatgggccgcgctaagtcagccggttcgtcaagtagcaaccccaaacttgctcttcctcaagccggtcgcaactatgc

SEQ ID NO: 3901 - DNA, 80 bp, Artificial Sequence
  Description of Artificial Sequence: Synthetic oligonucleotide
tgtatgggccgcgctaagtcagccggttcgtcaagtagcagctgagccaccactccttcccaagccggtcgcaactatgc

SEQ ID NO: 3902 - DNA, 80 bp, Artificial Sequence
  Description of Artificial Sequence: Synthetic oligonucleotide
tgtatgggccgcgctaagtcagccggttcgtcaagtagcaatgaggcatgggcatcttgccaagccggtcgcaactatgc

SEQ ID NO: 3903 - DNA, 80 bp, Artificial Sequence
  Description of Artificial Sequence: Synthetic oligonucleotide
tgtatgggccgcgctaagtcagccggttcgtcaagtagcaatggcttcagggcagaaacccaagccggtcgcaactatgc

SEQ ID NO: 3904 - DNA, 80 bp, Artificial Sequence
  Description of Artificial Sequence: Synthetic oligonucleotide
tgtatgggccgcgctaagtcagccggttcgtcaagtagcaatttggaggaacctggcacccaagccggtcgcaactatgc

SEQ ID NO: 3905 - DNA, 80 bp, Artificial Sequence
  Description of Artificial Sequence: Synthetic oligonucleotide
tgtatgggccgcgctaagtcagccggttcgtcaagtagcacccagtgagttgacctgacacaagccggtcgcaactatgc

SEQ ID NO: 3906 - DNA, 80 bp, Artificial Sequence
  Description of Artificial Sequence: Synthetic oligonucleotide
tgtatgggccgcgctaagtcagccggttcgtcaagtagcaaacagtgctaggtctgggagcaagccggtcgcaactatgc

SEQ ID NO: 3907 - DNA, 80 bp, Artificial Sequence
  Description of Artificial Sequence: Synthetic oligonucleotide
tgtatgggccgcgctaagtcagccggttcgtcaagtagcacacatgtgccaactgggactcaagccggtcgcaactatgc

SEQ ID NO: 3908 - DNA, 80 bp, Artificial Sequence
  Description of Artificial Sequence: Synthetic oligonucleotide
tgtatgggccgcgctaagtcagccggttcgtcaagtagcaggctatagcaacaggggctgcaagccggtcgcaactatgc

SEQ ID NO: 3909 - DNA, 80 bp, Artificial Sequence
  Description of Artificial Sequence: Synthetic oligonucleotide
tgtatgggccgcgctaagtcagccggttcgtcaagtagcaagataggaaacctgggagcacaagccggtcgcaactatgc

SEQ ID NO: 3910 - DNA, 80 bp, Artificial Sequence
  Description of Artificial Sequence: Synthetic oligonucleotide
tgtatgggccgcgctaagtcagccggttcgtcaagtagcaaacatggctaaggactcccacaagccggtcgcaactatgc

SEQ ID NO: 3911 - DNA, 80 bp, Artificial Sequence
  Description of Artificial Sequence: Synthetic oligonucleotide
tgtatgggccgcgctaagtcagccggttcgtcaagtagcattgcaagatgtgaccaagcacaagccggtcgcaactatgc

SEQ ID NO: 3912 - DNA, 80 bp, Artificial Sequence
  Description of Artificial Sequence: Synthetic oligonucleotide
tgtatgggccgcgctaagtcagccggttcgtcaagtagcaaaccagacactgacccctgacaagccggtcgcaactatgc

SEQ ID NO: 3913 - DNA, 80 bp, Artificial Sequence
  Description of Artificial Sequence: Synthetic oligonucleotide
tgtatgggccgcgctaagtcagccggttcgtcaagtagcattgctggtggttctgtgtttcaagccggtcgcaactatgc

SEQ ID NO: 3914 - DNA, 80 bp, Artificial Sequence
  Description of Artificial Sequence: Synthetic oligonucleotide
tgtatgggccgcgctaagtcagccggttcgtcaagtagcaaccaaaccaaagacccacctcaagccggtcgcaactatgc

SEQ ID NO: 3915 - DNA, 80 bp, Artificial Sequence
  Description of Artificial Sequence: Synthetic oligonucleotide
tgtatgggccgcgctaagtcagccggttcgtcaagtagcacccagggagaggtcagatctcaagccggtcgcaactatgc

SEQ ID NO: 3916 - DNA, 80 bp, Artificial Sequence
  Description of Artificial Sequence: Synthetic oligonucleotide
tgtatgggccgcgctaagtcagccggttcgtcaagtagcatgccgcaggaccagctccaccaagccggtcgcaactatgc

SEQ ID NO: 3917 - DNA, 80 bp, Artificial Sequence
  Description of Artificial Sequence: Synthetic oligonucleotide
tgtatgggccgcgctaagtcagccggttcgtcaagtagcacttctctgcccatctgcactcaagccggtcgcaactatgc

SEQ ID NO: 3918 - DNA, 80 bp, Artificial Sequence
  Description of Artificial Sequence: Synthetic oligonucleotide
tgtatgggccgcgctaagtcagccggttcgtcaagtagcatagactgtgctgtcccactgcaagccggtcgcaactatgc

SEQ ID NO: 3919 - DNA, 80 bp, Artificial Sequence
  Description of Artificial Sequence: Synthetic oligonucleotide
tgtatgggccgcgctaagtcagccggttcgtcaagtagcacatgcctccactcctgtcaccaagccggtcgcaactatgc

SEQ ID NO: 3920 - DNA, 80 bp, Artificial Sequence
  Description of Artificial Sequence: Synthetic oligonucleotide
tgtatgggccgcgctaagtcagccggttcgtcaagtagcagtgtgtgcactagcgactctcaagccggtcgcaactatgc

SEQ ID NO: 3921 - DNA, 80 bp, Artificial Sequence
  Description of Artificial Sequence: Synthetic oligonucleotide
tgtatgggccgcgctaagtcagccggttcgtcaagtagcatctgctcctccacgaatgaccaagccggtcgcaactatgc

SEQ ID NO: 3922 - DNA, 80 bp, Artificial Sequence
  Description of Artificial Sequence: Synthetic oligonucleotide
tgtatgggccgcgctaagtcagccggttcgtcaagtagcatgctggaacaaactgaagcacaagccggtcgcaactatgc

SEQ ID NO: 3923 - DNA, 80 bp, Artificial Sequence
  Description of Artificial Sequence: Synthetic oligonucleotide
tgtatgggccgcgctaagtcagccggttcgtcaagtagcacacctctaagtgcaggagggcaagccggtcgcaactatgc

SEQ ID NO: 3924 - DNA, 80 bp, Artificial Sequence
  Description of Artificial Sequence: Synthetic oligonucleotide
tgtatgggccgcgctaagtcagccggttcgtcaagtagcatccttccctgcttgagtgctcaagccggtcgcaactatgc

SEQ ID NO: 3925 - DNA, 80 bp, Artificial Sequence
  Description of Artificial Sequence: Synthetic oligonucleotide
tgtatgggccgcgctaagtcagccggttcgtcaagtagcatttgttagctgggtctgggccaagccggtcgcaactatgc

SEQ ID NO: 3926 - DNA, 80 bp, Artificial Sequence
  Description of Artificial Sequence: Synthetic oligonucleotide
tgtatgggccgcgctaagtcagccggttcgtcaagtagcaagactgctgacatcacaccccaagccggtcgcaactatgc

SEQ ID NO: 3927 - DNA, 80 bp, Artificial Sequence
  Description of Artificial Sequence: Synthetic oligonucleotide
tgtatgggccgcgctaagtcagccggttcgtcaagtagcatgccatcagctgcatgacaacaagccggtcgcaactatgc

SEQ ID NO: 3928 - DNA, 80 bp, Artificial Sequence
  Description of Artificial Sequence: Synthetic oligonucleotide
tgtatgggccgcgctaagtcagccggttcgtcaagtagcaggtcttagcaacagggaagccaagccggtcgcaactatgc

SEQ ID NO: 3929 - DNA, 80 bp, Artificial Sequence
  Description of Artificial Sequence: Synthetic oligonucleotide
tgtatgggccgcgctaagtcagccggttcgtcaagtagcatcccaacctggacccacaaccaagccggtcgcaactatgc

SEQ ID NO: 3930 - DNA, 80 bp, Artificial Sequence
  Description of Artificial Sequence: Synthetic oligonucleotide
tgtatgggccgcgctaagtcagccggttcgtcaagtagcaccactctaccactgcctgatcaagccggtcgcaactatgc

SEQ ID NO: 3931 - DNA, 80 bp, Artificial Sequence
  Description of Artificial Sequence: Synthetic oligonucleotide
tgtatgggccgcgctaagtcagccggttcgtcaagtagcaactggcccagtttctctcctcaagccggtcgcaactatgc

SEQ ID NO: 3932 - DNA, 80 bp, Artificial Sequence
  Description of Artificial Sequence: Synthetic oligonucleotide
tgtatgggccgcgctaagtcagccggttcgtcaagtagcatttaggaacagccagggacacaagccggtcgcaactatgc

SEQ ID NO: 3933 - DNA, 80 bp, Artificial Sequence
  Description of Artificial Sequence: Synthetic oligonucleotide
tgtatgggccgcgctaagtcagccggttcgtcaagtagcatgctgcaccaaggcaatattcaagccggtcgcaactatgc

SEQ ID NO: 3934 - DNA, 80 bp, Artificial Sequence
  Description of Artificial Sequence: Synthetic oligonucleotide
tgtatgggccgcgctaagtcagccggttcgtcaagtagcagcgcttcaaggtgagcacaacaagccggtcgcaactatgc

SEQ ID NO: 3935 - DNA, 80 bp, Artificial Sequence
  Description of Artificial Sequence: Synthetic oligonucleotide
tgtatgggccgcgctaagtcagccggttcgtcaagtagcacaggcagcatccgggttcatcaagccggtcgcaactatgc

SEQ ID NO: 3936 - DNA, 80 bp, Artificial Sequence
  Description of Artificial Sequence: Synthetic oligonucleotide
tgtatgggccgcgctaagtcagccggttcgtcaagtagcaagagagagcaggtgatggaccaagccggtcgcaactatgc

SEQ ID NO: 3937 - DNA, 80 bp, Artificial Sequence
  Description of Artificial Sequence: Synthetic oligonucleotide
tgtatgggccgcgctaagtcagccggttcgtcaagtagcaagcaggagtaagagcagtgccaagccggtcgcaactatgc

SEQ ID NO: 3938 - DNA, 80 bp, Artificial Sequence
  Description of Artificial Sequence: Synthetic oligonucleotide
tgtatgggccgcgctaagtcagccggttcgtcaagtagcattttctccttgggtgagggccaagccggtcgcaactatgc

SEQ ID NO: 3939 - DNA, 80 bp, Artificial Sequence
  Description of Artificial Sequence: Synthetic oligonucleotide
tgtatgggccgcgctaagtcagccggttcgtcaagtagcaacacccctaaactctctgcacaagccggtcgcaactatgc

SEQ ID NO: 3940 - DNA, 80 bp, Artificial Sequence
  Description of Artificial Sequence: Synthetic oligonucleotide
tgtatgggccgcgctaagtcagccggttcgtcaagtagcacactgaggaagctggggagacaagccggtcgcaactatgc

SEQ ID NO: 3941 - DNA, 80 bp, Artificial Sequence
  Description of Artificial Sequence: Synthetic oligonucleotide
tgtatgggccgcgctaagtcagccggttcgtcaagtagcagtcaaagggtggatcatgcccaagccggtcgcaactatgc

SEQ ID NO: 3942 - DNA, 80 bp, Artificial Sequence
  Description of Artificial Sequence: Synthetic oligonucleotide
tgtatgggccgcgctaagtcagccggttcgtcaagtagcaccattgcaacactctgaccccaagccggtcgcaactatgc

SEQ ID NO: 3943 - DNA, 80 bp, Artificial Sequence
  Description of Artificial Sequence: Synthetic oligonucleotide
tgtatgggccgcgctaagtcagccggttcgtcaagtagcaattcgacttggagtctgggacaagccggtcgcaactatgc

SEQ ID NO: 3944 - DNA, 80 bp, Artificial Sequence
  Description of Artificial Sequence: Synthetic oligonucleotide
tgtatgggccgcgctaagtcagccggttcgtcaagtagcacgggaccctgctattctcaccaagccggtcgcaactatgc

SEQ ID NO: 3945 - DNA, 80 bp, Artificial Sequence
  Description of Artificial Sequence: Synthetic oligonucleotide
tgtatgggccgcgctaagtcagccggttcgtcaagtagcatgctcagacgtaaaagctgccaagccggtcgcaactatgc

SEQ ID NO: 3946 - DNA, 80 bp, Artificial Sequence
  Description of Artificial Sequence: Synthetic oligonucleotide
tgtatgggccgcgctaagtcagccggttcgtcaagtagcagaaccaagtcctcgctatgccaagccggtcgcaactatgc

SEQ ID NO: 3947 - DNA, 80 bp, Artificial Sequence
  Description of Artificial Sequence: Synthetic oligonucleotide
tgtatgggccgcgctaagtcagccggttcgtcaagtagcacccaaggtgctagctcagatcaagccggtcgcaactatgc

SEQ ID NO: 3948 - DNA, 80 bp, Artificial Sequence
  Description of Artificial Sequence: Synthetic oligonucleotide
tgtatgggccgcgctaagtcagccggttcgtcaagtagcagaggaagacgctaggctcagcaagccggtcgcaactatgc

SEQ ID NO: 3949 - DNA, 80 bp, Artificial Sequence
  Description of Artificial Sequence: Synthetic oligonucleotide
tgtatgggccgcgctaagtcagccggttcgtcaagtagcactgcctacccagagagcatacaagccggtcgcaactatgc

SEQ ID NO: 3950 - DNA, 80 bp, Artificial Sequence
  Description of Artificial Sequence: Synthetic oligonucleotide
tgtatgggccgcgctaagtcagccggttcgtcaagtagcaagccagtatgaaccagggcccaagccggtcgcaactatgc

SEQ ID NO: 3951 - DNA, 80 bp, Artificial Sequence
  Description of Artificial Sequence: Synthetic oligonucleotide
tgtatgggccgcgctaagtcagccggttcgtcaagtagcattcatagtccagctcgtccacaagccggtcgcaactatgc

SEQ ID NO: 3952 - DNA, 80 bp, Artificial Sequence
  Description of Artificial Sequence: Synthetic oligonucleotide
tgtatgggccgcgctaagtcagccggttcgtcaagtagcatggcagtgactcttgggtcacaagccggtcgcaactatgc

SEQ ID NO: 3953 - DNA, 80 bp, Artificial Sequence
  Description of Artificial Sequence: Synthetic oligonucleotide
tgtatgggccgcgctaagtcagccggttcgtcaagtagcaacactccccaaggcaaaactcaagccggtcgcaactatgc

SEQ ID NO: 3954 - DNA, 80 bp, Artificial Sequence
  Description of Artificial Sequence: Synthetic oligonucleotide
tgtatgggccgcgctaagtcagccggttcgtcaagtagcaagaggtaaggatgcatcgctcaagccggtcgcaactatgc

SEQ ID NO: 3955 - DNA, 80 bp, Artificial Sequence
  Description of Artificial Sequence: Synthetic oligonucleotide
tgtatgggccgcgctaagtcagccggttcgtcaagtagcagcaagttaccccagttccagcaagccggtcgcaactatgc

SEQ ID NO: 3956 - DNA, 80 bp, Artificial Sequence
  Description of Artificial Sequence: Synthetic oligonucleotide
tgtatgggccgcgctaagtcagccggttcgtcaagtagcaacccagaatccagggcctaccaagccggtcgcaactatgc

SEQ ID NO: 3957 - DNA, 80 bp, Artificial Sequence
  Description of Artificial Sequence: Synthetic oligonucleotide
tgtatgggccgcgctaagtcagccggttcgtcaagtagcaccacttgggcaatggtaccacaagccggtcgcaactatgc

SEQ ID NO: 3958 - DNA, 80 bp, Artificial Sequence
  Description of Artificial Sequence: Synthetic oligonucleotide
tgtatgggccgcgctaagtcagccggttcgtcaagtagcactatggcctcaagtgggagccaagccggtcgcaactatgc

SEQ ID NO: 3959 - DNA, 80 bp, Artificial Sequence
  Description of Artificial Sequence: Synthetic oligonucleotide
tgtatgggccgcgctaagtcagccggttcgtcaagtagcactatgcatccactctgcagccaagccggtcgcaactatgc

SEQ ID NO: 3960 - DNA, 80 bp, Artificial Sequence
  Description of Artificial Sequence: Synthetic oligonucleotide
tgtatgggccgcgctaagtcagccggttcgtcaagtagcagctcctgactgagacagagacaagccggtcgcaactatgc

SEQ ID NO: 3961 - DNA, 80 bp, Artificial Sequence
  Description of Artificial Sequence: Synthetic oligonucleotide
tgtatgggccgcgctaagtcagccggttcgtcaagtagcactcagtgtcaggttgatgcccaagccggtcgcaactatgc

SEQ ID NO: 3962 - DNA, 80 bp, Artificial Sequence
  Description of Artificial Sequence: Synthetic oligonucleotide
tgtatgggccgcgctaagtcagccggttcgtcaagtagcaagcagctctcagaactccagcaagccggtcgcaactatgc

SEQ ID NO: 3963 - DNA, 80 bp, Artificial Sequence
  Description of Artificial Sequence: Synthetic oligonucleotide
tgtatgggccgcgctaagtcagccggttcgtcaagtagcacagacatagggcagctgctccaagccggtcgcaactatgc

SEQ ID NO: 3964 - DNA, 80 bp, Artificial Sequence
  Description of Artificial Sequence: Synthetic oligonucleotide
tgtatgggccgcgctaagtcagccggttcgtcaagtagcattaggcaggcaatatgctgccaagccggtcgcaactatgc

SEQ ID NO: 3965 - DNA, 80 bp, Artificial Sequence
  Description of Artificial Sequence: Synthetic oligonucleotide
tgtatgggccgcgctaagtcagccggttcgtcaagtagcatcttgtacgagtggccatctcaagccggtcgcaactatgc

SEQ ID NO: 3966 - DNA, 80 bp, Artificial Sequence
  Description of Artificial Sequence: Synthetic oligonucleotide
tgtatgggccgcgctaagtcagccggttcgtcaagtagcaccaggcccactcgtaaaccccaagccggtcgcaactatgc

SEQ ID NO: 3967 - DNA, 80 bp, Artificial Sequence
  Description of Artificial Sequence: Synthetic oligonucleotide
tgtatgggccgcgctaagtcagccggttcgtcaagtagcattgctccagatttgttgccccaagccggtcgcaactatgc

SEQ ID NO: 3968 - DNA, 80 bp, Artificial Sequence
  Description of Artificial Sequence: Synthetic oligonucleotide
tgtatgggccgcgctaagtcagccggttcgtcaagtagcagatggaccccgttccaccaccaagccggtcgcaactatgc

SEQ ID NO: 3969 - DNA, 80 bp, Artificial Sequence
  Description of Artificial Sequence: Synthetic oligonucleotide
tgtatgggccgcgctaagtcagccggttcgtcaagtagcagagtggtggcggttaggcgccaagccggtcgcaactatgc

SEQ ID NO: 3970 - DNA, 80 bp, Artificial Sequence
  Description of Artificial Sequence: Synthetic oligonucleotide
tgtatgggccgcgctaagtcagccggttcgtcaagtagcattctctctccagcggtaacccaagccggtcgcaactatgc

SEQ ID NO: 3971 - DNA, 80 bp, Artificial Sequence
  Description of Artificial Sequence: Synthetic oligonucleotide
tgtatgggccgcgctaagtcagccggttcgtcaagtagcatcctcctgtgaattagccctcaagccggtcgcaactatgc

SEQ ID NO: 3972 - DNA, 80 bp, Artificial Sequence
  Description of Artificial Sequence: Synthetic oligonucleotide
tgtatgggccgcgctaagtcagccggttcgtcaagtagcagacacacagacctggcttttcaagccggtcgcaactatgc

SEQ ID NO: 3973 - DNA, 80 bp, Artificial Sequence
  Description of Artificial Sequence: Synthetic oligonucleotide
tgtatgggccgcgctaagtcagccggttcgtcaagtagcaggcagaaacctggctgtaaccaagccggtcgcaactatgc

SEQ ID NO: 3974 - DNA, 80 bp, Artificial Sequence
  Description of Artificial Sequence: Synthetic oligonucleotide
tgtatgggccgcgctaagtcagccggttcgtcaagtagcaccacataacaatcccaggcccaagccggtcgcaactatgc

SEQ ID NO: 3975 - DNA, 80 bp, Artificial Sequence
  Description of Artificial Sequence: Synthetic oligonucleotide
tgtatgggccgcgctaagtcagccggttcgtcaagtagcaggcaatgtgggagattctggcaagccggtcgcaactatgc

SEQ ID NO: 3976 - DNA, 80 bp, Artificial Sequence
  Description of Artificial Sequence: Synthetic oligonucleotide
tgtatgggccgcgctaagtcagccggttcgtcaagtagcacctccccgacatctccagaccaagccggtcgcaactatgc

SEQ ID NO: 3977 - DNA, 80 bp, Artificial Sequence
  Description of Artificial Sequence: Synthetic oligonucleotide
tgtatgggccgcgctaagtcagccggttcgtcaagtagcattctgtggccgggcacgagtcaagccggtcgcaactatgc

SEQ ID NO: 3978 - DNA, 80 bp, Artificial Sequence
  Description of Artificial Sequence: Synthetic oligonucleotide
tgtatgggccgcgctaagtcagccggttcgtcaagtagcatctcgtccctggcagctggccaagccggtcgcaactatgc

SEQ ID NO: 3979 - DNA, 80 bp, Artificial Sequence
  Description of Artificial Sequence: Synthetic oligonucleotide
tgtatgggccgcgctaagtcagccggttcgtcaagtagcactgatgtcagcatgttggggcaagccggtcgcaactatgc

SEQ ID NO: 3980 - DNA, 80 bp, Artificial Sequence
  Description of Artificial Sequence: Synthetic oligonucleotide
tgtatgggccgcgctaagtcagccggttcgtcaagtagcattgtgtgctaactgtctggccaagccggtcgcaactatgc

SEQ ID NO: 3981 - DNA, 80 bp, Artificial Sequence
  Description of Artificial Sequence: Synthetic oligonucleotide
tgtatgggccgcgctaagtcagccggttcgtcaagtagcacctagaccaggcttctagcacaagccggtcgcaactatgc

SEQ ID NO: 3982 - DNA, 80 bp, Artificial Sequence
  Description of Artificial Sequence: Synthetic oligonucleotide
tgtatgggccgcgctaagtcagccggttcgtcaagtagcaagcttccagttgcacagactcaagccggtcgcaactatgc

SEQ ID NO: 3983 - DNA, 80 bp, Artificial Sequence
  Description of Artificial Sequence: Synthetic oligonucleotide
tgtatgggccgcgctaagtcagccggttcgtcaagtagcaaataaagagagggccagccacaagccggtcgcaactatgc

SEQ ID NO: 3984 - DNA, 80 bp, Artificial Sequence
  Description of Artificial Sequence: Synthetic oligonucleotide
tgtatgggccgcgctaagtcagccggttcgtcaagtagcacggcctcttttcttgtcacacaagccggtcgcaactatgc

SEQ ID NO: 3985 - DNA, 80 bp, Artificial Sequence
  Description of Artificial Sequence: Synthetic oligonucleotide
tgtatgggccgcgctaagtcagccggttcgtcaagtagcattttgggctgggctgtttctcaagccggtcgcaactatgc

SEQ ID NO: 3986 - DNA, 80 bp, Artificial Sequence
  Description of Artificial Sequence: Synthetic oligonucleotide
tgtatgggccgcgctaagtcagccggttcgtcaagtagcagctttctcctctgcgcagttcaagccggtcgcaactatgc

SEQ ID NO: 3987 - DNA, 80 bp, Artificial Sequence
  Description of Artificial Sequence: Synthetic oligonucleotide
tgtatgggccgcgctaagtcagccggttcgtcaagtagcatggtgtggtctgtgtcagtgcaagccggtcgcaactatgc

SEQ ID NO: 3988 - DNA, 80 bp, Artificial Sequence
  Description of Artificial Sequence: Synthetic oligonucleotide
tgtatgggccgcgctaagtcagccggttcgtcaagtagcaccagggccagaagctgttctcaagccggtcgcaactatgc

SEQ ID NO: 3989 - DNA, 80 bp, Artificial Sequence
  Description of Artificial Sequence: Synthetic oligonucleotide
tgtatgggccgcgctaagtcagccggttcgtcaagtagcatggcgatataggagcttccccaagccggtcgcaactatgc

SEQ ID NO: 3990 - DNA, 80 bp, Artificial Sequence
  Description of Artificial Sequence: Synthetic oligonucleotide
tgtatgggccgcgctaagtcagccggttcgtcaagtagcatgggaccatctgcatactgacaagccggtcgcaactatgc

SEQ ID NO: 3991 - DNA, 80 bp, Artificial Sequence
  Description of Artificial Sequence: Synthetic oligonucleotide
tgtatgggccgcgctaagtcagccggttcgtcaagtagcatttggcaacacaatggcagccaagccggtcgcaactatgc

SEQ ID NO: 3992 - DNA, 80 bp, Artificial Sequence
  Description of Artificial Sequence: Synthetic oligonucleotide
tgtatgggccgcgctaagtcagccggttcgtcaagtagcatacaaacctcagaggctggacaagccggtcgcaactatgc

SEQ ID NO: 3993 - DNA, 80 bp, Artificial Sequence
  Description of Artificial Sequence: Synthetic oligonucleotide
tgtatgggccgcgctaagtcagccggttcgtcaagtagcactcaaagacaggcccattgccaagccggtcgcaactatgc

SEQ ID NO: 3994 - DNA, 80 bp, Artificial Sequence
  Description of Artificial Sequence: Synthetic oligonucleotide
tgtatgggccgcgctaagtcagccggttcgtcaagtagcatgtggggatctctgtcacatcaagccggtcgcaactatgc

SEQ ID NO: 3995 - DNA, 80 bp, Artificial Sequence
  Description of Artificial Sequence: Synthetic oligonucleotide
tgtatgggccgcgctaagtcagccggttcgtcaagtagcattgcaataaagggccatgcacaagccggtcgcaactatgc

SEQ ID NO: 3996 - DNA, 80 bp, Artificial Sequence
  Description of Artificial Sequence: Synthetic oligonucleotide
tgtatgggccgcgctaagtcagccggttcgtcaagtagcaactagatgctgcacttcccacaagccggtcgcaactatgc

SEQ ID NO: 3997 - DNA, 80 bp, Artificial Sequence
  Description of Artificial Sequence: Synthetic oligonucleotide
tgtatgggccgcgctaagtcagccggttcgtcaagtagcaggggcttgtattggtcacaccaagccggtcgcaactatgc

SEQ ID NO: 3998 - DNA, 80 bp, Artificial Sequence
  Description of Artificial Sequence: Synthetic oligonucleotide
tgtatgggccgcgctaagtcagccggttcgtcaagtagcacagtcccagggcgacaattccaagccggtcgcaactatgc

SEQ ID NO: 3999 - DNA, 80 bp, Artificial Sequence
  Description of Artificial Sequence: Synthetic oligonucleotide
tgtatgggccgcgctaagtcagccggttcgtcaagtagcaagagaagtccagaggcaccacaagccggtcgcaactatgc

SEQ ID NO: 4000 - DNA, 80 bp, Artificial Sequence
  Description of Artificial Sequence: Synthetic oligonucleotide
tgtatgggccgcgctaagtcagccggttcgtcaagtagcatttaggccacaacagcttgccaagccggtcgcaactatgc

SEQ ID NO: 4001 - DNA, 80 bp, Artificial Sequence
  Description of Artificial Sequence: Synthetic oligonucleotide
tgtatgggccgcgctaagtcagccggttcgtcaagtagcatctgccgtggtaaactcagccaagccggtcgcaactatgc

SEQ ID NO: 4002 - DNA, 80 bp, Artificial Sequence
  Description of Artificial Sequence: Synthetic oligonucleotide
tgtatgggccgcgctaagtcagccggttcgtcaagtagcaaaccctggtgatcatgcgcccaagccggtcgcaactatgc

SEQ ID NO: 4003 - DNA, 80 bp, Artificial Sequence
  Description of Artificial Sequence: Synthetic oligonucleotide
tgtatgggccgcgctaagtcagccggttcgtcaagtagcagctcttcgcaccatcaactgcaagccggtcgcaactatgc

SEQ ID NO: 4004 - DNA, 80 bp, Artificial Sequence
  Description of Artificial Sequence: Synthetic oligonucleotide
tgtatgggccgcgctaagtcagccggttcgtcaagtagcatgctcaactctgctgttcaccaagccggtcgcaactatgc

SEQ ID NO: 4005 - DNA, 80 bp, Artificial Sequence
  Description of Artificial Sequence: Synthetic oligonucleotide
tgtatgggccgcgctaagtcagccggttcgtcaagtagcactttctggggactcgcagagcaagccggtcgcaactatgc

SEQ ID NO: 4006 - DNA, 80 bp, Artificial Sequence
  Description of Artificial Sequence: Synthetic oligonucleotide
tgtatgggccgcgctaagtcagccggttcgtcaagtagcatgcacggcattggcactgagcaagccggtcgcaactatgc

SEQ ID NO: 4007 - DNA, 80 bp, Artificial Sequence
  Description of Artificial Sequence: Synthetic oligonucleotide
tgtatgggccgcgctaagtcagccggttcgtcaagtagcaagtcccctgccctgtcctaccaagccggtcgcaactatgc

SEQ ID NO: 4008 - DNA, 80 bp, Artificial Sequence
  Description of Artificial Sequence: Synthetic oligonucleotide
tgtatgggccgcgctaagtcagccggttcgtcaagtagcaaccagccagatttcctcacacaagccggtcgcaactatgc

SEQ ID NO: 4009 - DNA, 80 bp, Artificial Sequence
  Description of Artificial Sequence: Synthetic oligonucleotide
tgtatgggccgcgctaagtcagccggttcgtcaagtagcaggaggaaccctgttgcagaccaagccggtcgcaactatgc

SEQ ID NO: 4010 - DNA, 80 bp, Artificial Sequence
  Description of Artificial Sequence: Synthetic oligonucleotide
tgtatgggccgcgctaagtcagccggttcgtcaagtagcaccacgggtcgggtcatgggacaagccggtcgcaactatgc

SEQ ID NO: 4011 - DNA, 80 bp, Artificial Sequence
  Description of Artificial Sequence: Synthetic oligonucleotide
tgtatgggccgcgctaagtcagccggttcgtcaagtagcaaaagtgatggggatcagcctcaagccggtcgcaactatgc

SEQ ID NO: 4012 - DNA, 80 bp, Artificial Sequence
  Description of Artificial Sequence: Synthetic oligonucleotide
tgtatgggccgcgctaagtcagccggttcgtcaagtagcactgtggggcttagggagtggcaagccggtcgcaactatgc

SEQ ID NO: 4013 - DNA, 80 bp, Artificial Sequence
  Description of Artificial Sequence: Synthetic oligonucleotide
tgtatgggccgcgctaagtctgtatgccgagcggttcagtgccacccactaccatatggacaagccggtcgcaactatgc

SEQ ID NO: 4014 - DNA, 80 bp, Artificial Sequence
  Description of Artificial Sequence: Synthetic oligonucleotide
tgtatgggccgcgctaagtctgtatgccgagcggttcagttgcatcctgtgaagacaccacaagccggtcgcaactatgc

SEQ ID NO: 4015 - DNA, 80 bp, Artificial Sequence
  Description of Artificial Sequence: Synthetic oligonucleotide
tgtatgggccgcgctaagtctgtatgccgagcggttcagtatggtagcttcgggagatgtcaagccggtcgcaactatgc

SEQ ID NO: 4016 - DNA, 80 bp, Artificial Sequence
  Description of Artificial Sequence: Synthetic oligonucleotide
tgtatgggccgcgctaagtctgtatgccgagcggttcagtcagggtctttgcatcagagccaagccggtcgcaactatgc

SEQ ID NO: 4017 - DNA, 80 bp, Artificial Sequence
  Description of Artificial Sequence: Synthetic oligonucleotide
tgtatgggccgcgctaagtctgtatgccgagcggttcagttgaaccaggatgggcatagtcaagccggtcgcaactatgc

SEQ ID NO: 4018 - DNA, 80 bp, Artificial Sequence
  Description of Artificial Sequence: Synthetic oligonucleotide
tgtatgggccgcgctaagtctgtatgccgagcggttcagttccttccctacaacttggcccaagccggtcgcaactatgc

SEQ ID NO: 4019 - DNA, 80 bp, Artificial Sequence
  Description of Artificial Sequence: Synthetic oligonucleotide
tgtatgggccgcgctaagtctgtatgccgagcggttcagttgcaggcactgatttgaagccaagccggtcgcaactatgc

SEQ ID NO: 4020 - DNA, 80 bp, Artificial Sequence
  Description of Artificial Sequence: Synthetic oligonucleotide
tgtatgggccgcgctaagtctgtatgccgagcggttcagtaggcttcatctggtcctgtgcaagccggtcgcaactatgc

SEQ ID NO: 4021 - DNA, 80 bp, Artificial Sequence
  Description of Artificial Sequence: Synthetic oligonucleotide
tgtatgggccgcgctaagtctgtatgccgagcggttcagttctttgcctcgggatctacacaagccggtcgcaactatgc

SEQ ID NO: 4022 - DNA, 80 bp, Artificial Sequence
  Description of Artificial Sequence: Synthetic oligonucleotide
tgtatgggccgcgctaagtctgtatgccgagcggttcagttggagtcactgccgagaatgcaagccggtcgcaactatgc

SEQ ID NO: 4023 - DNA, 80 bp, Artificial Sequence
  Description of Artificial Sequence: Synthetic oligonucleotide
tgtatgggccgcgctaagtctgtatgccgagcggttcagtgcctgtgcatcgtgagagatcaagccggtcgcaactatgc

SEQ ID NO: 4024 - DNA, 80 bp, Artificial Sequence
  Description of Artificial Sequence: Synthetic oligonucleotide
tgtatgggccgcgctaagtctgtatgccgagcggttcagtgaaagagcctttgcacctggcaagccggtcgcaactatgc

SEQ ID NO: 4025 - DNA, 80 bp, Artificial Sequence
  Description of Artificial Sequence: Synthetic oligonucleotide
tgtatgggccgcgctaagtctgtatgccgagcggttcagtctatggatggctgcatgacccaagccggtcgcaactatgc

SEQ ID NO: 4026 - DNA, 80 bp, Artificial Sequence
  Description of Artificial Sequence: Synthetic oligonucleotide
tgtatgggccgcgctaagtctgtatgccgagcggttcagtggttctgcaagaatctgggccaagccggtcgcaactatgc

SEQ ID NO: 4027 - DNA, 80 bp, Artificial Sequence
  Description of Artificial Sequence: Synthetic oligonucleotide
tgtatgggccgcgctaagtctgtatgccgagcggttcagtagtggtcatagatgggtgctcaagccggtcgcaactatgc

SEQ ID NO: 4028 - DNA, 80 bp, Artificial Sequence
  Description of Artificial Sequence: Synthetic oligonucleotide
tgtatgggccgcgctaagtctgtatgccgagcggttcagtatgacagatgcagacggtggcaagccggtcgcaactatgc

SEQ ID NO: 4029 - DNA, 80 bp, Artificial Sequence
  Description of Artificial Sequence: Synthetic oligonucleotide
tgtatgggccgcgctaagtctgtatgccgagcggttcagtatcacctgacctcctggaggcaagccggtcgcaactatgc

SEQ ID NO: 4030 - DNA, 80 bp, Artificial Sequence
  Description of Artificial Sequence: Synthetic oligonucleotide
tgtatgggccgcgctaagtctgtatgccgagcggttcagtaccgaacccgacaggagccccaagccggtcgcaactatgc

SEQ ID NO: 4031 - DNA, 80 bp, Artificial Sequence
  Description of Artificial Sequence: Synthetic oligonucleotide
tgtatgggccgcgctaagtctgtatgccgagcggttcagtgacaaaagcaacccggcgaacaagccggtcgcaactatgc

SEQ ID NO: 4032 - DNA, 80 bp, Artificial Sequence
  Description of Artificial Sequence: Synthetic oligonucleotide
tgtatgggccgcgctaagtctgtatgccgagcggttcagtacgggcagcaaagagcacgtcaagccggtcgcaactatgc

SEQ ID NO: 4033 - DNA, 80 bp, Artificial Sequence
  Description of Artificial Sequence: Synthetic oligonucleotide
tgtatgggccgcgctaagtctgtatgccgagcggttcagttattgcgtctatcccagccccaagccggtcgcaactatgc

SEQ ID NO: 4034 - DNA, 80 bp, Artificial Sequence
  Description of Artificial Sequence: Synthetic oligonucleotide
tgtatgggccgcgctaagtctgtatgccgagcggttcagttcccactgacaaaggactctcaagccggtcgcaactatgc

SEQ ID NO: 4035 - DNA, 80 bp, Artificial Sequence
  Description of Artificial Sequence: Synthetic oligonucleotide
tgtatgggccgcgctaagtctgtatgccgagcggttcagtgttctgctcagctggctcttcaagccggtcgcaactatgc

SEQ ID NO: 4036 - DNA, 80 bp, Artificial Sequence
  Description of Artificial Sequence: Synthetic oligonucleotide
tgtatgggccgcgctaagtctgtatgccgagcggttcagtcatgccgtgtaagactgagccaagccggtcgcaactatgc

SEQ ID NO: 4037 - DNA, 80 bp, Artificial Sequence
  Description of Artificial Sequence: Synthetic oligonucleotide
tgtatgggccgcgctaagtctgtatgccgagcggttcagttctacatggtagcagctgcacaagccggtcgcaactatgc

SEQ ID NO: 4038 - DNA, 80 bp, Artificial Sequence
  Description of Artificial Sequence: Synthetic oligonucleotide
tgtatgggccgcgctaagtctgtatgccgagcggttcagttcgttgagggcattctctgacaagccggtcgcaactatgc

SEQ ID NO: 4039 - DNA, 80 bp, Artificial Sequence
  Description of Artificial Sequence: Synthetic oligonucleotide
tgtatgggccgcgctaagtctgtatgccgagcggttcagtaaacccaggacatgcttggacaagccggtcgcaactatgc

SEQ ID NO: 4040 - DNA, 80 bp, Artificial Sequence
  Description of Artificial Sequence: Synthetic oligonucleotide
tgtatgggccgcgctaagtctgtatgccgagcggttcagtccgtgcccaaatatacgtgccaagccggtcgcaactatgc

SEQ ID NO: 4041 - DNA, 80 bp, Artificial Sequence
  Description of Artificial Sequence: Synthetic oligonucleotide
tgtatgggccgcgctaagtctgtatgccgagcggttcagtaagcaatgcatgagagctgtcaagccggtcgcaactatgc

SEQ ID NO: 4042 - DNA, 80 bp, Artificial Sequence
  Description of Artificial Sequence: Synthetic oligonucleotide
tgtatgggccgcgctaagtctgtatgccgagcggttcagtagtagagaccggctaagtggcaagccggtcgcaactatgc

SEQ ID NO: 4043 - DNA, 80 bp, Artificial Sequence
  Description of Artificial Sequence: Synthetic oligonucleotide
tgtatgggccgcgctaagtctgtatgccgagcggttcagttgctaggaaatggtagccctcaagccggtcgcaactatgc

SEQ ID NO: 4044 - DNA, 80 bp, Artificial Sequence
  Description of Artificial Sequence: Synthetic oligonucleotide
tgtatgggccgcgctaagtctgtatgccgagcggttcagtggtcatttggggtccctacacaagccggtcgcaactatgc

SEQ ID NO: 4045 - DNA, 80 bp, Artificial Sequence
  Description of Artificial Sequence: Synthetic oligonucleotide
tgtatgggccgcgctaagtctgtatgccgagcggttcagtatatagacctggcaggcactcaagccggtcgcaactatgc

SEQ ID NO: 4046 - DNA, 80 bp, Artificial Sequence
  Description of Artificial Sequence: Synthetic oligonucleotide
tgtatgggccgcgctaagtctgtatgccgagcggttcagtacatgcagtggtagctggttcaagccggtcgcaactatgc

SEQ ID NO: 4047 - DNA, 80 bp, Artificial Sequence
  Description of Artificial Sequence: Synthetic oligonucleotide
tgtatgggccgcgctaagtctgtatgccgagcggttcagtttgtagcactggtgactggacaagccggtcgcaactatgc

SEQ ID NO: 4048 - DNA, 80 bp, Artificial Sequence
  Description of Artificial Sequence: Synthetic oligonucleotide
tgtatgggccgcgctaagtctgtatgccgagcggttcagtttctgtttgtgtgcggttgacaagccggtcgcaactatgc

SEQ ID NO: 4049 - DNA, 80 bp, Artificial Sequence
  Description of Artificial Sequence: Synthetic oligonucleotide
tgtatgggccgcgctaagtctgtatgccgagcggttcagttttgagattcccgaggcagacaagccggtcgcaactatgc

SEQ ID NO: 4050 - DNA, 80 bp, Artificial Sequence
  Description of Artificial Sequence: Synthetic oligonucleotide
tgtatgggccgcgctaagtctgtatgccgagcggttcagtaacaaggttggaagtcaggccaagccggtcgcaactatgc

SEQ ID NO: 4051 - DNA, 80 bp, Artificial Sequence
  Description of Artificial Sequence: Synthetic oligonucleotide
tgtatgggccgcgctaagtctgtatgccgagcggttcagtgagggttaagggagcactgtcaagccggtcgcaactatgc

SEQ ID NO: 4052 - DNA, 80 bp, Artificial Sequence
  Description of Artificial Sequence: Synthetic oligonucleotide
tgtatgggccgcgctaagtctgtatgccgagcggttcagtctggaatggtgccttgcattcaagccggtcgcaactatgc

SEQ ID NO: 4053 - DNA, 80 bp, Artificial Sequence
  Description of Artificial Sequence: Synthetic oligonucleotide
tgtatgggccgcgctaagtctgtatgccgagcggttcagtgccggagcatcgcaattattcaagccggtcgcaactatgc

SEQ ID NO: 4054 - DNA, 80 bp, Artificial Sequence
  Description of Artificial Sequence: Synthetic oligonucleotide
tgtatgggccgcgctaagtctgtatgccgagcggttcagtagcactcctattgtcaccgccaagccggtcgcaactatgc

SEQ ID NO: 4055 - DNA, 80 bp, Artificial Sequence
  Description of Artificial Sequence: Synthetic oligonucleotide
tgtatgggccgcgctaagtctgtatgccgagcggttcagtttgatgaccaagctccatgccaagccggtcgcaactatgc

SEQ ID NO: 4056 - DNA, 80 bp, Artificial Sequence
  Description of Artificial Sequence: Synthetic oligonucleotide
tgtatgggccgcgctaagtctgtatgccgagcggttcagtccaaaatgggctgtcatgctcaagccggtcgcaactatgc

SEQ ID NO: 4057 - DNA, 80 bp, Artificial Sequence
  Description of Artificial Sequence: Synthetic oligonucleotide
tgtatgggccgcgctaagtctgtatgccgagcggttcagtgaggctggccatctcatcatcaagccggtcgcaactatgc

SEQ ID NO: 4058 - DNA, 80 bp, Artificial Sequence
  Description of Artificial Sequence: Synthetic oligonucleotide
tgtatgggccgcgctaagtctgtatgccgagcggttcagtatctctgagtgcatggagctcaagccggtcgcaactatgc

SEQ ID NO: 4059 - DNA, 80 bp, Artificial Sequence
  Description of Artificial Sequence: Synthetic oligonucleotide
tgtatgggccgcgctaagtctgtatgccgagcggttcagtggggaaaggcacgttcagagcaagccggtcgcaactatgc

SEQ ID NO: 4060 - DNA, 80 bp, Artificial Sequence
  Description of Artificial Sequence: Synthetic oligonucleotide
tgtatgggccgcgctaagtctgtatgccgagcggttcagtagatcccttgtgccacaacacaagccggtcgcaactatgc

SEQ ID NO: 4061 - DNA, 80 bp, Artificial Sequence
  Description of Artificial Sequence: Synthetic oligonucleotide
tgtatgggccgcgctaagtctgtatgccgagcggttcagtggtgcaagatctcatctggccaagccggtcgcaactatgc

SEQ ID NO: 4062 - DNA, 80 bp, Artificial Sequence
  Description of Artificial Sequence: Synthetic oligonucleotide
tgtatgggccgcgctaagtctgtatgccgagcggttcagtctcaggggagcttagagggtcaagccggtcgcaactatgc

SEQ ID NO: 4063 - DNA, 80 bp, Artificial Sequence
  Description of Artificial Sequence: Synthetic oligonucleotide
tgtatgggccgcgctaagtctgtatgccgagcggttcagtttcttggtgtcatgtgacgccaagccggtcgcaactatgc

SEQ ID NO: 4064 - DNA, 80 bp, Artificial Sequence
  Description of Artificial Sequence: Synthetic oligonucleotide
tgtatgggccgcgctaagtctgtatgccgagcggttcagtagctctgaatctacagggcacaagccggtcgcaactatgc

SEQ ID NO: 4065 - DNA, 80 bp, Artificial Sequence
  Description of Artificial Sequence: Synthetic oligonucleotide
tgtatgggccgcgctaagtctgtatgccgagcggttcagtaccgtcagtggtgtttggagcaagccggtcgcaactatgc

SEQ ID NO: 4066 - DNA, 80 bp, Artificial Sequence
  Description of Artificial Sequence: Synthetic oligonucleotide
tgtatgggccgcgctaagtctgtatgccgagcggttcagtcagctgttccgactgatgctcaagccggtcgcaactatgc

SEQ ID NO: 4067 - DNA, 80 bp, Artificial Sequence
  Description of Artificial Sequence: Synthetic oligonucleotide
tgtatgggccgcgctaagtctgtatgccgagcggttcagtcagtggccaagcagcatttacaagccggtcgcaactatgc

SEQ ID NO: 4068 - DNA, 80 bp, Artificial Sequence
  Description of Artificial Sequence: Synthetic oligonucleotide
tgtatgggccgcgctaagtctgtatgccgagcggttcagtctctgtggccacattctgctcaagccggtcgcaactatgc

SEQ ID NO: 4069 - DNA, 80 bp, Artificial Sequence
  Description of Artificial Sequence: Synthetic oligonucleotide
tgtatgggccgcgctaagtctgtatgccgagcggttcagttatcaccctctctgcatggtcaagccggtcgcaactatgc

SEQ ID NO: 4070 - DNA, 80 bp, Artificial Sequence
  Description of Artificial Sequence: Synthetic oligonucleotide
tgtatgggccgcgctaagtctgtatgccgagcggttcagtggggaaacccgaagggaggccaagccggtcgcaactatgc

SEQ ID NO: 4071 - DNA, 80 bp, Artificial Sequence
  Description of Artificial Sequence: Synthetic oligonucleotide
tgtatgggccgcgctaagtctgtatgccgagcggttcagtggcccctcctgtctaaagcacaagccggtcgcaactatgc

SEQ ID NO: 4072 - DNA, 80 bp, Artificial Sequence
  Description of Artificial Sequence: Synthetic oligonucleotide
tgtatgggccgcgctaagtctgtatgccgagcggttcagtagagtgggagcatgatggttcaagccggtcgcaactatgc

SEQ ID NO: 4073 - DNA, 80 bp, Artificial Sequence
  Description of Artificial Sequence: Synthetic oligonucleotide
tgtatgggccgcgctaagtctgtatgccgagcggttcagtgaggacgccgcaccccaactcaagccggtcgcaactatgc

SEQ ID NO: 4074 - DNA, 80 bp, Artificial Sequence
  Description of Artificial Sequence: Synthetic oligonucleotide
tgtatgggccgcgctaagtctgtatgccgagcggttcagtccctttccatactgcatgcccaagccggtcgcaactatgc

SEQ ID NO: 4075 - DNA, 80 bp, Artificial Sequence
  Description of Artificial Sequence: Synthetic oligonucleotide
tgtatgggccgcgctaagtctgtatgccgagcggttcagtccgaggggcatggaacaggacaagccggtcgcaactatgc

SEQ ID NO: 4076 - DNA, 80 bp, Artificial Sequence
  Description of Artificial Sequence: Synthetic oligonucleotide
tgtatgggccgcgctaagtctgtatgccgagcggttcagttgcatcttacctgtggacgtcaagccggtcgcaactatgc

SEQ ID NO: 4077 - DNA, 80 bp, Artificial Sequence
  Description of Artificial Sequence: Synthetic oligonucleotide
tgtatgggccgcgctaagtctgtatgccgagcggttcagtgctggaatggccactgagtgcaagccggtcgcaactatgc

SEQ ID NO: 4078 - DNA, 80 bp, Artificial Sequence
  Description of Artificial Sequence: Synthetic oligonucleotide
tgtatgggccgcgctaagtctgtatgccgagcggttcagtcagtctggacccattgcctgcaagccggtcgcaactatgc

SEQ ID NO: 4079 - DNA, 80 bp, Artificial Sequence
  Description of Artificial Sequence: Synthetic oligonucleotide
tgtatgggccgcgctaagtctgtatgccgagcggttcagtaacctttgaggagtcaccgacaagccggtcgcaactatgc

SEQ ID NO: 4080 - DNA, 80 bp, Artificial Sequence
  Description of Artificial Sequence: Synthetic oligonucleotide
tgtatgggccgcgctaagtctgtatgccgagcggttcagtagactggaagtccgcagctccaagccggtcgcaactatgc

SEQ ID NO: 4081 - DNA, 80 bp, Artificial Sequence
  Description of Artificial Sequence: Synthetic oligonucleotide
tgtatgggccgcgctaagtctgtatgccgagcggttcagtcactctgactcaccgcatctcaagccggtcgcaactatgc

SEQ ID NO: 4082 - DNA, 80 bp, Artificial Sequence
  Description of Artificial Sequence: Synthetic oligonucleotide
tgtatgggccgcgctaagtctgtatgccgagcggttcagttgtccaagaaccaggaaggccaagccggtcgcaactatgc

SEQ ID NO: 4083 - DNA, 80 bp, Artificial Sequence
  Description of Artificial Sequence: Synthetic oligonucleotide
tgtatgggccgcgctaagtctgtatgccgagcggttcagttgtaccaaagcctggactgccaagccggtcgcaactatgc

SEQ ID NO: 4084 - DNA, 80 bp, Artificial Sequence
  Description of Artificial Sequence: Synthetic oligonucleotide
tgtatgggccgcgctaagtctgtatgccgagcggttcagtcagttgctcagaactggcaacaagccggtcgcaactatgc

SEQ ID NO: 4085 - DNA, 80 bp, Artificial Sequence
  Description of Artificial Sequence: Synthetic oligonucleotide
tgtatgggccgcgctaagtctgtatgccgagcggttcagttggtctactgggcaattgggcaagccggtcgcaactatgc

SEQ ID NO: 4086 - DNA, 80 bp, Artificial Sequence
  Description of Artificial Sequence: Synthetic oligonucleotide
tgtatgggccgcgctaagtctgtatgccgagcggttcagtgccccagtgaactgctctgtcaagccggtcgcaactatgc

SEQ ID NO: 4087 - DNA, 80 bp, Artificial Sequence
  Description of Artificial Sequence: Synthetic oligonucleotide
tgtatgggccgcgctaagtctgtatgccgagcggttcagtgccacagctttgaacctgctcaagccggtcgcaactatgc

SEQ ID NO: 4088 - DNA, 80 bp, Artificial Sequence
  Description of Artificial Sequence: Synthetic oligonucleotide
tgtatgggccgcgctaagtctgtatgccgagcggttcagtgaggttgctgggagttagctcaagccggtcgcaactatgc

SEQ ID NO: 4089 - DNA, 80 bp, Artificial Sequence
  Description of Artificial Sequence: Synthetic oligonucleotide
tgtatgggccgcgctaagtctgtatgccgagcggttcagttttgggttgtctccacaagccaagccggtcgcaactatgc

SEQ ID NO: 4090 - DNA, 80 bp, Artificial Sequence
  Description of Artificial Sequence: Synthetic oligonucleotide
tgtatgggccgcgctaagtctgtatgccgagcggttcagtaaccctcaggagcttaacgacaagccggtcgcaactatgc

SEQ ID NO: 4091 - DNA, 80 bp, Artificial Sequence
  Description of Artificial Sequence: Synthetic oligonucleotide
tgtatgggccgcgctaagtctgtatgccgagcggttcagtcgtctccccgcatggcacctcaagccggtcgcaactatgc

SEQ ID NO: 4092 - DNA, 80 bp, Artificial Sequence
  Description of Artificial Sequence: Synthetic oligonucleotide
tgtatgggccgcgctaagtctgtatgccgagcggttcagttccccgttaaggacttgtgccaagccggtcgcaactatgc

SEQ ID NO: 4093 - DNA, 80 bp, Artificial Sequence
  Description of Artificial Sequence: Synthetic oligonucleotide
tgtatgggccgcgctaagtctgtatgccgagcggttcagtttctgcactcacaactggctcaagccggtcgcaactatgc

SEQ ID NO: 4094 - DNA, 80 bp, Artificial Sequence
  Description of Artificial Sequence: Synthetic oligonucleotide
tgtatgggccgcgctaagtctgtatgccgagcggttcagtaatggccctgagcatgtcatcaagccggtcgcaactatgc

SEQ ID NO: 4095 - DNA, 80 bp, Artificial Sequence
  Description of Artificial Sequence: Synthetic oligonucleotide
tgtatgggccgcgctaagtctgtatgccgagcggttcagtctctgcccagaacattgcatcaagccggtcgcaactatgc

SEQ ID NO: 4096 - DNA, 80 bp, Artificial Sequence
  Description of Artificial Sequence: Synthetic oligonucleotide
tgtatgggccgcgctaagtctgtatgccgagcggttcagtttggcattgaggctggaacgcaagccggtcgcaactatgc

SEQ ID NO: 4097 - DNA, 80 bp, Artificial Sequence
  Description of Artificial Sequence: Synthetic oligonucleotide
tgtatgggccgcgctaagtctgtatgccgagcggttcagtcctgccgccatcgtgccactcaagccggtcgcaactatgc

SEQ ID NO: 4098 - DNA, 80 bp, Artificial Sequence
  Description of Artificial Sequence: Synthetic oligonucleotide
tgtatgggccgcgctaagtctgtatgccgagcggttcagtgacttagtgagggtggcgttcaagccggtcgcaactatgc

SEQ ID NO: 4099 - DNA, 80 bp, Artificial Sequence
  Description of Artificial Sequence: Synthetic oligonucleotide
tgtatgggccgcgctaagtctgtatgccgagcggttcagtccccttccctcaggatcccccaagccggtcgcaactatgc

SEQ ID NO: 4100 - DNA, 80 bp, Artificial Sequence
  Description of Artificial Sequence: Synthetic oligonucleotide
tgtatgggccgcgctaagtctgtatgccgagcggttcagttcttccttgtgctgggacttcaagccggtcgcaactatgc

SEQ ID NO: 4101 - DNA, 80 bp, Artificial Sequence
  Description of Artificial Sequence: Synthetic oligonucleotide
tgtatgggccgcgctaagtctgtatgccgagcggttcagtccccttcacctgtcactctgcaagccggtcgcaactatgc

SEQ ID NO: 4102 - DNA, 80 bp, Artificial Sequence
  Description of Artificial Sequence: Synthetic oligonucleotide
tgtatgggccgcgctaagtctgtatgccgagcggttcagtacagccatctccgtgggactcaagccggtcgcaactatgc

SEQ ID NO: 4103 - DNA, 80 bp, Artificial Sequence
  Description of Artificial Sequence: Synthetic oligonucleotide
tgtatgggccgcgctaagtctgtatgccgagcggttcagtccccatcagcccacaagatgcaagccggtcgcaactatgc

SEQ ID NO: 4104 - DNA, 80 bp, Artificial Sequence
  Description of Artificial Sequence: Synthetic oligonucleotide
tgtatgggccgcgctaagtctgtatgccgagcggttcagtgcccaccatatgctaccactcaagccggtcgcaactatgc

SEQ ID NO: 4105 - DNA, 80 bp, Artificial Sequence
  Description of Artificial Sequence: Synthetic oligonucleotide
tgtatgggccgcgctaagtctgtatgccgagcggttcagttctgcacttggctcttgactcaagccggtcgcaactatgc

SEQ ID NO: 4106 - DNA, 80 bp, Artificial Sequence
  Description of Artificial Sequence: Synthetic oligonucleotide
tgtatgggccgcgctaagtctgtatgccgagcggttcagtgcatgggcttctcagaactgcaagccggtcgcaactatgc

SEQ ID NO: 4107 - DNA, 80 bp, Artificial Sequence
  Description of Artificial Sequence: Synthetic oligonucleotide
tgtatgggccgcgctaagtctgtatgccgagcggttcagtacggggcttagagtcatgttcaagccggtcgcaactatgc

SEQ ID NO: 4108 - DNA, 80 bp, Artificial Sequence
  Description of Artificial Sequence: Synthetic oligonucleotide
tgtatgggccgcgctaagtctgtatgccgagcggttcagtcctcccaggcactatccctacaagccggtcgcaactatgc

SEQ ID NO: 4109 - DNA, 80 bp, Artificial Sequence
  Description of Artificial Sequence: Synthetic oligonucleotide
tgtatgggccgcgctaagtctgtatgccgagcggttcagtgcccatgcaagacttcacagcaagccggtcgcaactatgc

SEQ ID NO: 4110 - DNA, 80 bp, Artificial Sequence
  Description of Artificial Sequence: Synthetic oligonucleotide
tgtatgggccgcgctaagtctgtatgccgagcggttcagtatgatctgcacacccctgaccaagccggtcgcaactatgc

SEQ ID NO: 4111 - DNA, 80 bp, Artificial Sequence
  Description of Artificial Sequence: Synthetic oligonucleotide
tgtatgggccgcgctaagtctgtatgccgagcggttcagttgtgcacacacggttaactgcaagccggtcgcaactatgc

SEQ ID NO: 4112 - DNA, 80 bp, Artificial Sequence
  Description of Artificial Sequence: Synthetic oligonucleotide
tgtatgggccgcgctaagtctgtatgccgagcggttcagtccgttcgggcctactggagacaagccggtcgcaactatgc

SEQ ID NO: 4113 - DNA, 80 bp, Artificial Sequence
  Description of Artificial Sequence: Synthetic oligonucleotide
tgtatgggccgcgctaagtctgtatgccgagcggttcagtcccacagagttgctgatcgacaagccggtcgcaactatgc

SEQ ID NO: 4114 - DNA, 80 bp, Artificial Sequence
  Description of Artificial Sequence: Synthetic oligonucleotide
tgtatgggccgcgctaagtctgtatgccgagcggttcagttttcctgctcttttcctggccaagccggtcgcaactatgc

SEQ ID NO: 4115 - DNA, 80 bp, Artificial Sequence
  Description of Artificial Sequence: Synthetic oligonucleotide
tgtatgggccgcgctaagtctgtatgccgagcggttcagtaggttaaggacatgcgcacacaagccggtcgcaactatgc

SEQ ID NO: 4116 - DNA, 80 bp, Artificial Sequence
  Description of Artificial Sequence: Synthetic oligonucleotide
tgtatgggccgcgctaagtctgtatgccgagcggttcagtatgtcctagatcagtgcccccaagccggtcgcaactatgc

SEQ ID NO: 4117 - DNA, 80 bp, Artificial Sequence
  Description of Artificial Sequence: Synthetic oligonucleotide
tgtatgggccgcgctaagtctgtatgccgagcggttcagttgttgagtgcaaggccaattcaagccggtcgcaactatgc

SEQ ID NO: 4118 - DNA, 80 bp, Artificial Sequence
  Description of Artificial Sequence: Synthetic oligonucleotide
tgtatgggccgcgctaagtcagccggttcgtcaagtagcaatgggagacctgatgggagacaagccggtcgcaactatgc

SEQ ID NO: 4119 - DNA, 80 bp, Artificial Sequence
  Description of Artificial Sequence: Synthetic oligonucleotide
tgtatgggccgcgctaagtcagccggttcgtcaagtagcagctgggtgctggcaagtactcaagccggtcgcaactatgc

SEQ ID NO: 4120 - DNA, 80 bp, Artificial Sequence
  Description of Artificial Sequence: Synthetic oligonucleotide
tgtatgggccgcgctaagtcagccggttcgtcaagtagcatgaagtggagtaagaggccacaagccggtcgcaactatgc

SEQ ID NO: 4121 - DNA, 80 bp, Artificial Sequence
  Description of Artificial Sequence: Synthetic oligonucleotide
tgtatgggccgcgctaagtcagccggttcgtcaagtagcaacaagtcagacaaggaccctcaagccggtcgcaactatgc

SEQ ID NO: 4122 - DNA, 80 bp, Artificial Sequence
  Description of Artificial Sequence: Synthetic oligonucleotide
tgtatgggccgcgctaagtcagccggttcgtcaagtagcaagggtccaaagaggaaagggcaagccggtcgcaactatgc

SEQ ID NO: 4123 - DNA, 80 bp, Artificial Sequence
  Description of Artificial Sequence: Synthetic oligonucleotide
tgtatgggccgcgctaagtcagccggttcgtcaagtagcagatgcagcaccccaccagagcaagccggtcgcaactatgc

SEQ ID NO: 4124 - DNA, 80 bp, Artificial Sequence
  Description of Artificial Sequence: Synthetic oligonucleotide
tgtatgggccgcgctaagtcagccggttcgtcaagtagcaattgtacagagcgagggactcaagccggtcgcaactatgc

SEQ ID NO: 4125 - DNA, 80 bp, Artificial Sequence
  Description of Artificial Sequence: Synthetic oligonucleotide
tgtatgggccgcgctaagtcagccggttcgtcaagtagcactggcggaacttggtgctctcaagccggtcgcaactatgc

SEQ ID NO: 4126 - DNA, 80 bp, Artificial Sequence
  Description of Artificial Sequence: Synthetic oligonucleotide
tgtatgggccgcgctaagtcagccggttcgtcaagtagcacctcttaccactcgccttgacaagccggtcgcaactatgc

SEQ ID NO: 4127 - DNA, 80 bp, Artificial Sequence
  Description of Artificial Sequence: Synthetic oligonucleotide
tgtatgggccgcgctaagtcagccggttcgtcaagtagcagtgtgcagcacggtttgtttcaagccggtcgcaactatgc

SEQ ID NO: 4128 - DNA, 80 bp, Artificial Sequence
  Description of Artificial Sequence: Synthetic oligonucleotide
tgtatgggccgcgctaagtcagccggttcgtcaagtagcatcaccatccagaggcaaacacaagccggtcgcaactatgc

SEQ ID NO: 4129 - DNA, 80 bp, Artificial Sequence
  Description of Artificial Sequence: Synthetic oligonucleotide
tgtatgggccgcgctaagtcagccggttcgtcaagtagcaaaatggtccagtcttgcagccaagccggtcgcaactatgc

SEQ ID NO: 4130 - DNA, 80 bp, Artificial Sequence
  Description of Artificial Sequence: Synthetic oligonucleotide
tgtatgggccgcgctaagtcagccggttcgtcaagtagcaacacttctgagcatgcgaggcaagccggtcgcaactatgc

SEQ ID NO: 4131 - DNA, 80 bp, Artificial Sequence
  Description of Artificial Sequence: Synthetic oligonucleotide
tgtatgggccgcgctaagtcagccggttcgtcaagtagcatggtggtgcttgacggggcacaagccggtcgcaactatgc

SEQ ID NO: 4132 - DNA, 80 bp, Artificial Sequence
  Description of Artificial Sequence: Synthetic oligonucleotide
tgtatgggccgcgctaagtcagccggttcgtcaagtagcattcccaaggcctaccattgacaagccggtcgcaactatgc

SEQ ID NO: 4133 - DNA, 80 bp, Artificial Sequence
  Description of Artificial Sequence: Synthetic oligonucleotide
tgtatgggccgcgctaagtcagccggttcgtcaagtagcaggcacacctcccaaccccaacaagccggtcgcaactatgc

SEQ ID NO: 4134 - DNA, 80 bp, Artificial Sequence
  Description of Artificial Sequence: Synthetic oligonucleotide
tgtatgggccgcgctaagtcagccggttcgtcaagtagcaggcttggaacttcctaccctcaagccggtcgcaactatgc

SEQ ID NO: 4135 - DNA, 80 bp, Artificial Sequence
  Description of Artificial Sequence: Synthetic oligonucleotide
tgtatgggccgcgctaagtcagccggttcgtcaagtagcaagattccaggtggagagtgccaagccggtcgcaactatgc

SEQ ID NO: 4136 - DNA, 80 bp, Artificial Sequence
  Description of Artificial Sequence: Synthetic oligonucleotide
tgtatgggccgcgctaagtcagccggttcgtcaagtagcacaatcccgccactgatgcaacaagccggtcgcaactatgc

SEQ ID NO: 4137 - DNA, 80 bp, Artificial Sequence
  Description of Artificial Sequence: Synthetic oligonucleotide
tgtatgggccgcgctaagtcagccggttcgtcaagtagcagtactgccgccagaggacctcaagccggtcgcaactatgc

SEQ ID NO: 4138 - DNA, 80 bp, Artificial Sequence
  Description of Artificial Sequence: Synthetic oligonucleotide
tgtatgggccgcgctaagtcagccggttcgtcaagtagcaggctccgttgttctacttggcaagccggtcgcaactatgc

SEQ ID NO: 4139 - DNA, 80 bp, Artificial Sequence
  Description of Artificial Sequence: Synthetic oligonucleotide
tgtatgggccgcgctaagtcagccggttcgtcaagtagcatccatgggagagaactgtgtcaagccggtcgcaactatgc

SEQ ID NO: 4140 - DNA, 80 bp, Artificial Sequence
  Description of Artificial Sequence: Synthetic oligonucleotide
tgtatgggccgcgctaagtcagccggttcgtcaagtagcatggcctatttcccttcagctcaagccggtcgcaactatgc

SEQ ID NO: 4141 - DNA, 80 bp, Artificial Sequence
  Description of Artificial Sequence: Synthetic oligonucleotide
tgtatgggccgcgctaagtcagccggttcgtcaagtagcactctggggaggaaatggcatcaagccggtcgcaactatgc

SEQ ID NO: 4142 - DNA, 80 bp, Artificial Sequence
  Description of Artificial Sequence: Synthetic oligonucleotide
tgtatgggccgcgctaagtcagccggttcgtcaagtagcaccacatgaaatcccagaggccaagccggtcgcaactatgc

SEQ ID NO: 4143 - DNA, 80 bp, Artificial Sequence
  Description of Artificial Sequence: Synthetic oligonucleotide
tgtatgggccgcgctaagtcagccggttcgtcaagtagcaacttcagctctcccattggccaagccggtcgcaactatgc

SEQ ID NO: 4144 - DNA, 80 bp, Artificial Sequence
  Description of Artificial Sequence: Synthetic oligonucleotide
tgtatgggccgcgctaagtcagccggttcgtcaagtagcaggaacctggaacaactgacccaagccggtcgcaactatgc

SEQ ID NO: 4145 - DNA, 80 bp, Artificial Sequence
  Description of Artificial Sequence: Synthetic oligonucleotide
tgtatgggccgcgctaagtcagccggttcgtcaagtagcatgggcacctctgtgaaaagacaagccggtcgcaactatgc

SEQ ID NO: 4146 - DNA, 80 bp, Artificial Sequence
  Description of Artificial Sequence: Synthetic oligonucleotide
tgtatgggccgcgctaagtcagccggttcgtcaagtagcaggtggaaggtgtgtgttcagcaagccggtcgcaactatgc

SEQ ID NO: 4147 - DNA, 80 bp, Artificial Sequence
  Description of Artificial Sequence: Synthetic oligonucleotide
tgtatgggccgcgctaagtcagccggttcgtcaagtagcataatgaaaggcgaggggagtcaagccggtcgcaactatgc

SEQ ID NO: 4148 - DNA, 80 bp, Artificial Sequence
  Description of Artificial Sequence: Synthetic oligonucleotide
tgtatgggccgcgctaagtcagccggttcgtcaagtagcaacactcctccactgaagagccaagccggtcgcaactatgc

SEQ ID NO: 4149 - DNA, 80 bp, Artificial Sequence
  Description of Artificial Sequence: Synthetic oligonucleotide
tgtatgggccgcgctaagtcagccggttcgtcaagtagcacataggaaggcggacactctcaagccggtcgcaactatgc

SEQ ID NO: 4150 - DNA, 80 bp, Artificial Sequence
  Description of Artificial Sequence: Synthetic oligonucleotide
tgtatgggccgcgctaagtcagccggttcgtcaagtagcatgcgtgggtgatgggcaaagcaagccggtcgcaactatgc

SEQ ID NO: 4151 - DNA, 80 bp, Artificial Sequence
  Description of Artificial Sequence: Synthetic oligonucleotide
tgtatgggccgcgctaagtcagccggttcgtcaagtagcatggtggctttaggtcgaactcaagccggtcgcaactatgc

SEQ ID NO: 4152 - DNA, 80 bp, Artificial Sequence
  Description of Artificial Sequence: Synthetic oligonucleotide
tgtatgggccgcgctaagtcagccggttcgtcaagtagcagcctctagtatcagggctgccaagccggtcgcaactatgc

SEQ ID NO: 4153 - DNA, 80 bp, Artificial Sequence
  Description of Artificial Sequence: Synthetic oligonucleotide
tgtatgggccgcgctaagtcagccggttcgtcaagtagcaacctcttccagtgaaaccgacaagccggtcgcaactatgc

SEQ ID NO: 4154 - DNA, 80 bp, Artificial Sequence
  Description of Artificial Sequence: Synthetic oligonucleotide
tgtatgggccgcgctaagtcagccggttcgtcaagtagcatgctcttactgtggccaggtcaagccggtcgcaactatgc

SEQ ID NO: 4155 - DNA, 80 bp, Artificial Sequence
  Description of Artificial Sequence: Synthetic oligonucleotide
tgtatgggccgcgctaagtcagccggttcgtcaagtagcaagttcttcatggaacgcacccaagccggtcgcaactatgc

SEQ ID NO: 4156 - DNA, 80 bp, Artificial Sequence
  Description of Artificial Sequence: Synthetic oligonucleotide
tgtatgggccgcgctaagtcagccggttcgtcaagtagcaaattgcgtcttcagcacacgcaagccggtcgcaactatgc

SEQ ID NO: 4157 - DNA, 80 bp, Artificial Sequence
  Description of Artificial Sequence: Synthetic oligonucleotide
tgtatgggccgcgctaagtcagccggttcgtcaagtagcaaagctgactagagcagagggcaagccggtcgcaactatgc

SEQ ID NO: 4158 - DNA, 80 bp, Artificial Sequence
  Description of Artificial Sequence: Synthetic oligonucleotide
tgtatgggccgcgctaagtcagccggttcgtcaagtagcagccaagatagctgaggggaacaagccggtcgcaactatgc

SEQ ID NO: 4159 - DNA, 80 bp, Artificial Sequence
  Description of Artificial Sequence: Synthetic oligonucleotide
tgtatgggccgcgctaagtcagccggttcgtcaagtagcatggcaaccattcatgtcctccaagccggtcgcaactatgc

SEQ ID NO: 4160 - DNA, 80 bp, Artificial Sequence
  Description of Artificial Sequence: Synthetic oligonucleotide
tgtatgggccgcgctaagtcagccggttcgtcaagtagcaagtaccactcaacagacccccaagccggtcgcaactatgc

SEQ ID NO: 4161 - DNA, 80 bp, Artificial Sequence
  Description of Artificial Sequence: Synthetic oligonucleotide
tgtatgggccgcgctaagtcagccggttcgtcaagtagcaagccttccagatcagaggtccaagccggtcgcaactatgc

SEQ ID NO: 4162 - DNA, 80 bp, Artificial Sequence
  Description of Artificial Sequence: Synthetic oligonucleotide
tgtatgggccgcgctaagtcagccggttcgtcaagtagcatggggttgcagcagacctttcaagccggtcgcaactatgc

SEQ ID NO: 4163 - DNA, 80 bp, Artificial Sequence
  Description of Artificial Sequence: Synthetic oligonucleotide
tgtatgggccgcgctaagtcagccggttcgtcaagtagcaaggctggaaatagaccctcacaagccggtcgcaactatgc

SEQ ID NO: 4164 - DNA, 80 bp, Artificial Sequence
  Description of Artificial Sequence: Synthetic oligonucleotide
tgtatgggccgcgctaagtcagccggttcgtcaagtagcaccagccctctcccataacaacaagccggtcgcaactatgc

SEQ ID NO: 4165 - DNA, 80 bp, Artificial Sequence
  Description of Artificial Sequence: Synthetic oligonucleotide
tgtatgggccgcgctaagtcagccggttcgtcaagtagcattaccccgaacccaaatccacaagccggtcgcaactatgc

SEQ ID NO: 4166 - DNA, 80 bp, Artificial Sequence
  Description of Artificial Sequence: Synthetic oligonucleotide
tgtatgggccgcgctaagtcagccggttcgtcaagtagcacaggcctgccatattccttccaagccggtcgcaactatgc

SEQ ID NO: 4167 - DNA, 80 bp, Artificial Sequence
  Description of Artificial Sequence: Synthetic oligonucleotide
tgtatgggccgcgctaagtcagccggttcgtcaagtagcagcctggagaaacgggaatcacaagccggtcgcaactatgc

SEQ ID NO: 4168 - DNA, 80 bp, Artificial Sequence
  Description of Artificial Sequence: Synthetic oligonucleotide
tgtatgggccgcgctaagtcagccggttcgtcaagtagcaacgtgaaactcaaaggctggcaagccggtcgcaactatgc

SEQ ID NO: 4169 - DNA, 80 bp, Artificial Sequence
  Description of Artificial Sequence: Synthetic oligonucleotide
tgtatgggccgcgctaagtcagccggttcgtcaagtagcacttctggcaagttggatggccaagccggtcgcaactatgc

SEQ ID NO: 4170 - DNA, 80 bp, Artificial Sequence
  Description of Artificial Sequence: Synthetic oligonucleotide
tgtatgggccgcgctaagtcagccggttcgtcaagtagcattcagcccaatattcgcagccaagccggtcgcaactatgc

SEQ ID NO: 4171 - DNA, 80 bp, Artificial Sequence
  Description of Artificial Sequence: Synthetic oligonucleotide
tgtatgggccgcgctaagtcagccggttcgtcaagtagcatgaggccacattgcttccagcaagccggtcgcaactatgc

SEQ ID NO: 4172 - DNA, 80 bp, Artificial Sequence
  Description of Artificial Sequence: Synthetic oligonucleotide
tgtatgggccgcgctaagtcagccggttcgtcaagtagcattggactgcttgtacttggccaagccggtcgcaactatgc

SEQ ID NO: 4173 - DNA, 80 bp, Artificial Sequence
  Description of Artificial Sequence: Synthetic oligonucleotide
tgtatgggccgcgctaagtcagccggttcgtcaagtagcatctccaatgcagggatgaggcaagccggtcgcaactatgc

SEQ ID NO: 4174 - DNA, 80 bp, Artificial Sequence
  Description of Artificial Sequence: Synthetic oligonucleotide
tgtatgggccgcgctaagtcagccggttcgtcaagtagcaccaggccaagtcggtctccacaagccggtcgcaactatgc

SEQ ID NO: 4175 - DNA, 80 bp, Artificial Sequence
  Description of Artificial Sequence: Synthetic oligonucleotide
tgtatgggccgcgctaagtcagccggttcgtcaagtagcactgaagacgaaaccctgctccaagccggtcgcaactatgc

SEQ ID NO: 4176 - DNA, 80 bp, Artificial Sequence
  Description of Artificial Sequence: Synthetic oligonucleotide
tgtatgggccgcgctaagtcagccggttcgtcaagtagcaacaactctccatgccttgcccaagccggtcgcaactatgc

SEQ ID NO: 4177 - DNA, 80 bp, Artificial Sequence
  Description of Artificial Sequence: Synthetic oligonucleotide
tgtatgggccgcgctaagtcagccggttcgtcaagtagcatcagatacttgggaagggctcaagccggtcgcaactatgc

SEQ ID NO: 4178 - DNA, 80 bp, Artificial Sequence
  Description of Artificial Sequence: Synthetic oligonucleotide
tgtatgggccgcgctaagtcagccggttcgtcaagtagcagagggtctcacctgtgcccacaagccggtcgcaactatgc

SEQ ID NO: 4179 - DNA, 80 bp, Artificial Sequence
  Description of Artificial Sequence: Synthetic oligonucleotide
tgtatgggccgcgctaagtcagccggttcgtcaagtagcaattggcccattgacagtggccaagccggtcgcaactatgc

SEQ ID NO: 4180 - DNA, 80 bp, Artificial Sequence
  Description of Artificial Sequence: Synthetic oligonucleotide
tgtatgggccgcgctaagtcagccggttcgtcaagtagcagcaagtttcttctgagcccccaagccggtcgcaactatgc

SEQ ID NO: 4181 - DNA, 80 bp, Artificial Sequence
  Description of Artificial Sequence: Synthetic oligonucleotide
tgtatgggccgcgctaagtcagccggttcgtcaagtagcagaacactgaggatgcactggcaagccggtcgcaactatgc

SEQ ID NO: 4182 - DNA, 80 bp, Artificial Sequence
  Description of Artificial Sequence: Synthetic oligonucleotide
tgtatgggccgcgctaagtcagccggttcgtcaagtagcattcatgtgactcccgggtggcaagccggtcgcaactatgc

SEQ ID NO: 4183 - DNA, 80 bp, Artificial Sequence
  Description of Artificial Sequence: Synthetic oligonucleotide
tgtatgggccgcgctaagtcagccggttcgtcaagtagcaaacatgattccaaccaccggcaagccggtcgcaactatgc

SEQ ID NO: 4184 - DNA, 80 bp, Artificial Sequence
  Description of Artificial Sequence: Synthetic oligonucleotide
tgtatgggccgcgctaagtcagccggttcgtcaagtagcaagggtctgtctgtttgcaaccaagccggtcgcaactatgc

SEQ ID NO: 4185 - DNA, 80 bp, Artificial Sequence
  Description of Artificial Sequence: Synthetic oligonucleotide
tgtatgggccgcgctaagtcagccggttcgtcaagtagcaagcctgctgacaaactcaagcaagccggtcgcaactatgc

SEQ ID NO: 4186 - DNA, 80 bp, Artificial Sequence
  Description of Artificial Sequence: Synthetic oligonucleotide
tgtatgggccgcgctaagtcagccggttcgtcaagtagcacaccatttccccgtgttaggcaagccggtcgcaactatgc

SEQ ID NO: 4187 - DNA, 80 bp, Artificial Sequence
  Description of Artificial Sequence: Synthetic oligonucleotide
tgtatgggccgcgctaagtcagccggttcgtcaagtagcatcttagcgggtatgaagccccaagccggtcgcaactatgc

SEQ ID NO: 4188 - DNA, 80 bp, Artificial Sequence
  Description of Artificial Sequence: Synthetic oligonucleotide
tgtatgggccgcgctaagtcagccggttcgtcaagtagcaaccgggcttatgttgaatgccaagccggtcgcaactatgc

SEQ ID NO: 4189 - DNA, 80 bp, Artificial Sequence
  Description of Artificial Sequence: Synthetic oligonucleotide
tgtatgggccgcgctaagtcagccggttcgtcaagtagcaaggggtgattagggtcaggccaagccggtcgcaactatgc

SEQ ID NO: 4190 - DNA, 80 bp, Artificial Sequence
  Description of Artificial Sequence: Synthetic oligonucleotide
tgtatgggccgcgctaagtcagccggttcgtcaagtagcatccaacttcaggaggcaagccaagccggtcgcaactatgc

SEQ ID NO: 4191 - DNA, 80 bp, Artificial Sequence
  Description of Artificial Sequence: Synthetic oligonucleotide
tgtatgggccgcgctaagtcagccggttcgtcaagtagcatacccacttttcaggagcctcaagccggtcgcaactatgc

SEQ ID NO: 4192 - DNA, 80 bp, Artificial Sequence
  Description of Artificial Sequence: Synthetic oligonucleotide
tgtatgggccgcgctaagtcagccggttcgtcaagtagcagtgcacacgggatttgaagacaagccggtcgcaactatgc

SEQ ID NO: 4193 - DNA, 80 bp, Artificial Sequence
  Description of Artificial Sequence: Synthetic oligonucleotide
tgtatgggccgcgctaagtcagccggttcgtcaagtagcagaggaactcaagggcccttccaagccggtcgcaactatgc

SEQ ID NO: 4194 - DNA, 80 bp, Artificial Sequence
  Description of Artificial Sequence: Synthetic oligonucleotide
tgtatgggccgcgctaagtcagccggttcgtcaagtagcatcatgatggctaggtctgcacaagccggtcgcaactatgc

SEQ ID NO: 4195 - DNA, 80 bp, Artificial Sequence
  Description of Artificial Sequence: Synthetic oligonucleotide
tgtatgggccgcgctaagtcagccggttcgtcaagtagcaccctggatcgcctcttttgtcaagccggtcgcaactatgc

SEQ ID NO: 4196 - DNA, 80 bp, Artificial Sequence
  Description of Artificial Sequence: Synthetic oligonucleotide
tgtatgggccgcgctaagtcagccggttcgtcaagtagcaagaaggaaggtcacatgggacaagccggtcgcaactatgc

SEQ ID NO: 4197 - DNA, 80 bp, Artificial Sequence
  Description of Artificial Sequence: Synthetic oligonucleotide
tgtatgggccgcgctaagtcagccggttcgtcaagtagcaaaactcacttgcagccacggcaagccggtcgcaactatgc

SEQ ID NO: 4198 - DNA, 80 bp, Artificial Sequence
  Description of Artificial Sequence: Synthetic oligonucleotide
tgtatgggccgcgctaagtcagccggttcgtcaagtagcagcagccaggcaatcttgacgcaagccggtcgcaactatgc

SEQ ID NO: 4199 - DNA, 80 bp, Artificial Sequence
  Description of Artificial Sequence: Synthetic oligonucleotide
tgtatgggccgcgctaagtcagccggttcgtcaagtagcaaggggtggagtttgagaaggcaagccggtcgcaactatgc

SEQ ID NO: 4200 - DNA, 80 bp, Artificial Sequence
  Description of Artificial Sequence: Synthetic oligonucleotide
tgtatgggccgcgctaagtcagccggttcgtcaagtagcatctatgtggatgtgctgccccaagccggtcgcaactatgc

SEQ ID NO: 4201 - DNA, 80 bp, Artificial Sequence
  Description of Artificial Sequence: Synthetic oligonucleotide
tgtatgggccgcgctaagtcagccggttcgtcaagtagcaacaccacctacccctgtcgccaagccggtcgcaactatgc

SEQ ID NO: 4202 - DNA, 80 bp, Artificial Sequence
  Description of Artificial Sequence: Synthetic oligonucleotide
tgtatgggccgcgctaagtcagccggttcgtcaagtagcagagagctgccaccagagtgacaagccggtcgcaactatgc

SEQ ID NO: 4203 - DNA, 80 bp, Artificial Sequence
  Description of Artificial Sequence: Synthetic oligonucleotide
tgtatgggccgcgctaagtcagccggttcgtcaagtagcagcacaaccctcttttgctcccaagccggtcgcaactatgc

SEQ ID NO: 4204 - DNA, 80 bp, Artificial Sequence
  Description of Artificial Sequence: Synthetic oligonucleotide
tgtatgggccgcgctaagtcagccggttcgtcaagtagcagctaccagaaatgccatgctcaagccggtcgcaactatgc

SEQ ID NO: 4205 - DNA, 80 bp, Artificial Sequence
  Description of Artificial Sequence: Synthetic oligonucleotide
tgtatgggccgcgctaagtcagccggttcgtcaagtagcatgtcagctttgcacttccaacaagccggtcgcaactatgc

SEQ ID NO: 4206 - DNA, 80 bp, Artificial Sequence
  Description of Artificial Sequence: Synthetic oligonucleotide
tgtatgggccgcgctaagtcagccggttcgtcaagtagcaggacaggaatgaggcaaggacaagccggtcgcaactatgc

SEQ ID NO: 4207 - DNA, 80 bp, Artificial Sequence
  Description of Artificial Sequence: Synthetic oligonucleotide
tgtatgggccgcgctaagtcagccggttcgtcaagtagcaatgtgtggacagtctgaccacaagccggtcgcaactatgc

SEQ ID NO: 4208 - DNA, 80 bp, Artificial Sequence
  Description of Artificial Sequence: Synthetic oligonucleotide
tgtatgggccgcgctaagtcagccggttcgtcaagtagcattgtgtcggatccacagagccaagccggtcgcaactatgc

SEQ ID NO: 4209 - DNA, 80 bp, Artificial Sequence
  Description of Artificial Sequence: Synthetic oligonucleotide
tgtatgggccgcgctaagtcagccggttcgtcaagtagcagcatgtacccagaaacctgccaagccggtcgcaactatgc

SEQ ID NO: 4210 - DNA, 80 bp, Artificial Sequence
  Description of Artificial Sequence: Synthetic oligonucleotide
tgtatgggccgcgctaagtcagccggttcgtcaagtagcatggccaagactaaatggggacaagccggtcgcaactatgc

SEQ ID NO: 4211 - DNA, 80 bp, Artificial Sequence
  Description of Artificial Sequence: Synthetic oligonucleotide
tgtatgggccgcgctaagtcagccggttcgtcaagtagcatcctgaaccccaactgttctcaagccggtcgcaactatgc

SEQ ID NO: 4212 - DNA, 80 bp, Artificial Sequence
  Description of Artificial Sequence: Synthetic oligonucleotide
tgtatgggccgcgctaagtcagccggttcgtcaagtagcattggctgtctttgttgctcccaagccggtcgcaactatgc

SEQ ID NO: 4213 - DNA, 80 bp, Artificial Sequence
  Description of Artificial Sequence: Synthetic oligonucleotide
tgtatgggccgcgctaagtcagccggttcgtcaagtagcatctctgatggcaaattgggccaagccggtcgcaactatgc

SEQ ID NO: 4214 - DNA, 80 bp, Artificial Sequence
  Description of Artificial Sequence: Synthetic oligonucleotide
tgtatgggccgcgctaagtcagccggttcgtcaagtagcaaatggatgatggagcccagacaagccggtcgcaactatgc

SEQ ID NO: 4215 - DNA, 80 bp, Artificial Sequence
  Description of Artificial Sequence: Synthetic oligonucleotide
tgtatgggccgcgctaagtcagccggttcgtcaagtagcacctggcatggtgaacttgttcaagccggtcgcaactatgc

SEQ ID NO: 4216 - DNA, 80 bp, Artificial Sequence
  Description of Artificial Sequence: Synthetic oligonucleotide
tgtatgggccgcgctaagtcagccggttcgtcaagtagcactttcaggattgcaggtgggcaagccggtcgcaactatgc

SEQ ID NO: 4217 - DNA, 80 bp, Artificial Sequence
  Description of Artificial Sequence: Synthetic oligonucleotide
tgtatgggccgcgctaagtcagccggttcgtcaagtagcaagtctggtggccctaaagtgcaagccggtcgcaactatgc

SEQ ID NO: 4218 - DNA, 80 bp, Artificial Sequence
  Description of Artificial Sequence: Synthetic oligonucleotide
tgtatgggccgcgctaagtcagccggttcgtcaagtagcagcagtgaaagcccagagtgacaagccggtcgcaactatgc

SEQ ID NO: 4219 - DNA, 80 bp, Artificial Sequence
  Description of Artificial Sequence: Synthetic oligonucleotide
tgtatgggccgcgctaagtcagccggttcgtcaagtagcaagggacagaggcgcagaggccaagccggtcgcaactatgc

SEQ ID NO: 4220 - DNA, 80 bp, Artificial Sequence
  Description of Artificial Sequence: Synthetic oligonucleotide
tgtatgggccgcgctaagtcagccggttcgtcaagtagcacaattctaggctttcgggcacaagccggtcgcaactatgc

SEQ ID NO: 4221 - DNA, 80 bp, Artificial Sequence
  Description of Artificial Sequence: Synthetic oligonucleotide
tgtatgggccgcgctaagtcagccggttcgtcaagtagcaaactatggaccacagaccggcaagccggtcgcaactatgc

SEQ ID NO: 4222 - DNA, 80 bp, Artificial Sequence
  Description of Artificial Sequence: Synthetic oligonucleotide
tgtatgggccgcgctaagtcagccggttcgtcaagtagcaaacagagtgtcatgtccccacaagccggtcgcaactatgc

SEQ ID NO: 4223 - DNA, 80 bp, Artificial Sequence
  Description of Artificial Sequence: Synthetic oligonucleotide
tgtatgggccgcgctaagtcagccggttcgtcaagtagcaagccaagtagtgctgcaacgcaagccggtcgcaactatgc

SEQ ID NO: 4224 - DNA, 80 bp, Artificial Sequence
  Description of Artificial Sequence: Synthetic oligonucleotide
tgtatgggccgcgctaagtcagccggttcgtcaagtagcaacccaattgcttagtgaggccaagccggtcgcaactatgc

SEQ ID NO: 4225 - DNA, 80 bp, Artificial Sequence
  Description of Artificial Sequence: Synthetic oligonucleotide
tgtatgggccgcgctaagtcagccggttcgtcaagtagcaatgcagctgccttgtacacacaagccggtcgcaactatgc

SEQ ID NO: 4226 - DNA, 80 bp, Artificial Sequence
  Description of Artificial Sequence: Synthetic oligonucleotide
tgtatgggccgcgctaagtcagccggttcgtcaagtagcaatggcctgtcgatagtctcccaagccggtcgcaactatgc

SEQ ID NO: 4227 - DNA, 80 bp, Artificial Sequence
  Description of Artificial Sequence: Synthetic oligonucleotide
tgtatgggccgcgctaagtcagccggttcgtcaagtagcacaagtgcccagacttcagcccaagccggtcgcaactatgc

SEQ ID NO: 4228 - DNA, 80 bp, Artificial Sequence
  Description of Artificial Sequence: Synthetic oligonucleotide
tgtatgggccgcgctaagtcagccggttcgtcaagtagcaaaactcctctggacctgacccaagccggtcgcaactatgc

SEQ ID NO: 4229 - DNA, 80 bp, Artificial Sequence
  Description of Artificial Sequence: Synthetic oligonucleotide
tgtatgggccgcgctaagtcagccggttcgtcaagtagcatcatggcttggtctccaggtcaagccggtcgcaactatgc

SEQ ID NO: 4230 - DNA, 80 bp, Artificial Sequence
  Description of Artificial Sequence: Synthetic oligonucleotide
tgtatgggccgcgctaagtcagccggttcgtcaagtagcaacagcgcccgccagcatcctcaagccggtcgcaactatgc

SEQ ID NO: 4231 - DNA, 80 bp, Artificial Sequence
  Description of Artificial Sequence: Synthetic oligonucleotide
tgtatgggccgcgctaagtcagccggttcgtcaagtagcaaaggctgggactgctaggcccaagccggtcgcaactatgc

SEQ ID NO: 4232 - DNA, 80 bp, Artificial Sequence
  Description of Artificial Sequence: Synthetic oligonucleotide
tgtatgggccgcgctaagtcagccggttcgtcaagtagcagctcagccatcttttcctgccaagccggtcgcaactatgc

SEQ ID NO: 4233 - DNA, 80 bp, Artificial Sequence
  Description of Artificial Sequence: Synthetic oligonucleotide
tgtatgggccgcgctaagtcagccggttcgtcaagtagcagtgctccacccctcccgtaacaagccggtcgcaactatgc

SEQ ID NO: 4234 - DNA, 80 bp, Artificial Sequence
  Description of Artificial Sequence: Synthetic oligonucleotide
tgtatgggccgcgctaagtcagccggttcgtcaagtagcacaccaccacaagctgttcttcaagccggtcgcaactatgc

SEQ ID NO: 4235 - DNA, 80 bp, Artificial Sequence
  Description of Artificial Sequence: Synthetic oligonucleotide
tgtatgggccgcgctaagtcagccggttcgtcaagtagcaatggtgtacccacagccaaacaagccggtcgcaactatgc

SEQ ID NO: 4236 - DNA, 80 bp, Artificial Sequence
  Description of Artificial Sequence: Synthetic oligonucleotide
tgtatgggccgcgctaagtcagccggttcgtcaagtagcatcttgcagtgctttcggggacaagccggtcgcaactatgc

SEQ ID NO: 4237 - DNA, 80 bp, Artificial Sequence
  Description of Artificial Sequence: Synthetic oligonucleotide
tgtatgggccgcgctaagtcagccggttcgtcaagtagcaatacacatcggtctggctgccaagccggtcgcaactatgc

SEQ ID NO: 4238 - DNA, 80 bp, Artificial Sequence
  Description of Artificial Sequence: Synthetic oligonucleotide
tgtatgggccgcgctaagtcagccggttcgtcaagtagcaacagacacgaggacaactgccaagccggtcgcaactatgc

SEQ ID NO: 4239 - DNA, 80 bp, Artificial Sequence
  Description of Artificial Sequence: Synthetic oligonucleotide
tgtatgggccgcgctaagtcagccggttcgtcaagtagcatgtttgcttcaatgcaggggcaagccggtcgcaactatgc

SEQ ID NO: 4240 - DNA, 80 bp, Artificial Sequence
  Description of Artificial Sequence: Synthetic oligonucleotide
tgtatgggccgcgctaagtcagccggttcgtcaagtagcatggtccgagaaaaggatgggcaagccggtcgcaactatgc

SEQ ID NO: 4241 - DNA, 80 bp, Artificial Sequence
  Description of Artificial Sequence: Synthetic oligonucleotide
tgtatgggccgcgctaagtcagccggttcgtcaagtagcaagcaggtgaggagctttgctcaagccggtcgcaactatgc

SEQ ID NO: 4242 - DNA, 80 bp, Artificial Sequence
  Description of Artificial Sequence: Synthetic oligonucleotide
tgtatgggccgcgctaagtcagccggttcgtcaagtagcacagaggccagaagtgggacccaagccggtcgcaactatgc

SEQ ID NO: 4243 - DNA, 80 bp, Artificial Sequence
  Description of Artificial Sequence: Synthetic oligonucleotide
tgtatgggccgcgctaagtcagccggttcgtcaagtagcagcttccatgggcgacgagaacaagccggtcgcaactatgc

SEQ ID NO: 4244 - DNA, 80 bp, Artificial Sequence
  Description of Artificial Sequence: Synthetic oligonucleotide
tgtatgggccgcgctaagtcagccggttcgtcaagtagcatggtggggacccagttaaggcaagccggtcgcaactatgc

SEQ ID NO: 4245 - DNA, 80 bp, Artificial Sequence
  Description of Artificial Sequence: Synthetic oligonucleotide
tgtatgggccgcgctaagtcagccggttcgtcaagtagcaagcgttgctttacgttgggtcaagccggtcgcaactatgc

SEQ ID NO: 4246 - DNA, 80 bp, Artificial Sequence
  Description of Artificial Sequence: Synthetic oligonucleotide
tgtatgggccgcgctaagtcagccggttcgtcaagtagcacagccgtgggtgatgatgtgcaagccggtcgcaactatgc

SEQ ID NO: 4247 - DNA, 80 bp, Artificial Sequence
  Description of Artificial Sequence: Synthetic oligonucleotide
tgtatgggccgcgctaagtctgtatgccgagcggttcagttggaacatggattcacagcccaagccggtcgcaactatgc

SEQ ID NO: 4248 - DNA, 80 bp, Artificial Sequence
  Description of Artificial Sequence: Synthetic oligonucleotide
tgtatgggccgcgctaagtctgtatgccgagcggttcagtcctggctgttttgaacgtcacaagccggtcgcaactatgc

SEQ ID NO: 4249 - DNA, 80 bp, Artificial Sequence
  Description of Artificial Sequence: Synthetic oligonucleotide
tgtatgggccgcgctaagtctgtatgccgagcggttcagtaagggagctttattgtgccgcaagccggtcgcaactatgc

SEQ ID NO: 4250 - DNA, 80 bp, Artificial Sequence
  Description of Artificial Sequence: Synthetic oligonucleotide
tgtatgggccgcgctaagtctgtatgccgagcggttcagtcaccgactgccaaaacatcacaagccggtcgcaactatgc

SEQ ID NO: 4251 - DNA, 80 bp, Artificial Sequence
  Description of Artificial Sequence: Synthetic oligonucleotide
tgtatgggccgcgctaagtctgtatgccgagcggttcagtacaggtggccatgcttttcccaagccggtcgcaactatgc

SEQ ID NO: 4252 - DNA, 80 bp, Artificial Sequence
  Description of Artificial Sequence: Synthetic oligonucleotide
tgtatgggccgcgctaagtctgtatgccgagcggttcagttgtaactatggggtctggcacaagccggtcgcaactatgc

SEQ ID NO: 4253 - DNA, 80 bp, Artificial Sequence
  Description of Artificial Sequence: Synthetic oligonucleotide
tgtatgggccgcgctaagtctgtatgccgagcggttcagttccccaaccacaatctacctcaagccggtcgcaactatgc

SEQ ID NO: 4254 - DNA, 80 bp, Artificial Sequence
  Description of Artificial Sequence: Synthetic oligonucleotide
tgtatgggccgcgctaagtctgtatgccgagcggttcagttgggacctcatgtaactgcacaagccggtcgcaactatgc

SEQ ID NO: 4255 - DNA, 80 bp, Artificial Sequence
  Description of Artificial Sequence: Synthetic oligonucleotide
tgtatgggccgcgctaagtctgtatgccgagcggttcagtgctggctctgactgacattgcaagccggtcgcaactatgc

SEQ ID NO: 4256 - DNA, 80 bp, Artificial Sequence
  Description of Artificial Sequence: Synthetic oligonucleotide
tgtatgggccgcgctaagtctgtatgccgagcggttcagtcccttgcaaagaacctctgccaagccggtcgcaactatgc

SEQ ID NO: 4257 - DNA, 80 bp, Artificial Sequence
  Description of Artificial Sequence: Synthetic oligonucleotide
tgtatgggccgcgctaagtctgtatgccgagcggttcagtccaaggcccaagttagcaaacaagccggtcgcaactatgc

SEQ ID NO: 4258 - DNA, 80 bp, Artificial Sequence
  Description of Artificial Sequence: Synthetic oligonucleotide
tgtatgggccgcgctaagtctgtatgccgagcggttcagtatccctgagttggctgtaggcaagccggtcgcaactatgc

SEQ ID NO: 4259 - DNA, 80 bp, Artificial Sequence
  Description of Artificial Sequence: Synthetic oligonucleotide
tgtatgggccgcgctaagtctgtatgccgagcggttcagtagggaggaagtaagggcgaccaagccggtcgcaactatgc

SEQ ID NO: 4260 - DNA, 80 bp, Artificial Sequence
  Description of Artificial Sequence: Synthetic oligonucleotide
tgtatgggccgcgctaagtctgtatgccgagcggttcagtaagaatgcttgacccacagccaagccggtcgcaactatgc

SEQ ID NO: 4261 - DNA, 80 bp, Artificial Sequence
  Description of Artificial Sequence: Synthetic oligonucleotide
tgtatgggccgcgctaagtctgtatgccgagcggttcagtagtgctgacagacacatgggcaagccggtcgcaactatgc

SEQ ID NO: 4262 - DNA, 80 bp, Artificial Sequence
  Description of Artificial Sequence: Synthetic oligonucleotide
tgtatgggccgcgctaagtctgtatgccgagcggttcagtatgagttaggagggcccatgcaagccggtcgcaactatgc

SEQ ID NO: 4263 - DNA, 80 bp, Artificial Sequence
  Description of Artificial Sequence: Synthetic oligonucleotide
tgtatgggccgcgctaagtctgtatgccgagcggttcagtatggggtctttgccatgagtcaagccggtcgcaactatgc

SEQ ID NO: 4264 - DNA, 80 bp, Artificial Sequence
  Description of Artificial Sequence: Synthetic oligonucleotide
tgtatgggccgcgctaagtctgtatgccgagcggttcagtcaaccatggtcacctgctgacaagccggtcgcaactatgc

SEQ ID NO: 4265 - DNA, 80 bp, Artificial Sequence
  Description of Artificial Sequence: Synthetic oligonucleotide
tgtatgggccgcgctaagtctgtatgccgagcggttcagtcagacactggtttacagggccaagccggtcgcaactatgc

SEQ ID NO: 4266 - DNA, 80 bp, Artificial Sequence
  Description of Artificial Sequence: Synthetic oligonucleotide
tgtatgggccgcgctaagtctgtatgccgagcggttcagtatgatgtagcccctggttcacaagccggtcgcaactatgc

SEQ ID NO: 4267 - DNA, 80 bp, Artificial Sequence
  Description of Artificial Sequence: Synthetic oligonucleotide
tgtatgggccgcgctaagtctgtatgccgagcggttcagtaggcaagaagcagattggggcaagccggtcgcaactatgc

SEQ ID NO: 4268 - DNA, 80 bp, Artificial Sequence
  Description of Artificial Sequence: Synthetic oligonucleotide
tgtatgggccgcgctaagtctgtatgccgagcggttcagtttgcacctgccttattgcctcaagccggtcgcaactatgc

SEQ ID NO: 4269 - DNA, 80 bp, Artificial Sequence
  Description of Artificial Sequence: Synthetic oligonucleotide
tgtatgggccgcgctaagtctgtatgccgagcggttcagtacatcttgcagacgctaccccaagccggtcgcaactatgc

SEQ ID NO: 4270 - DNA, 80 bp, Artificial Sequence
  Description of Artificial Sequence: Synthetic oligonucleotide
tgtatgggccgcgctaagtctgtatgccgagcggttcagtatccagtgggtagtgcttcccaagccggtcgcaactatgc

SEQ ID NO: 4271 - DNA, 80 bp, Artificial Sequence
  Description of Artificial Sequence: Synthetic oligonucleotide
tgtatgggccgcgctaagtctgtatgccgagcggttcagtcacattagtggcagtgcgtccaagccggtcgcaactatgc

SEQ ID NO: 4272 - DNA, 80 bp, Artificial Sequence
  Description of Artificial Sequence: Synthetic oligonucleotide
tgtatgggccgcgctaagtctgtatgccgagcggttcagtctggccacccaacgtaccaccaagccggtcgcaactatgc

SEQ ID NO: 4273 - DNA, 80 bp, Artificial Sequence
  Description of Artificial Sequence: Synthetic oligonucleotide
tgtatgggccgcgctaagtctgtatgccgagcggttcagtggaaaagtcgaggaactggccaagccggtcgcaactatgc

SEQ ID NO: 4274 - DNA, 80 bp, Artificial Sequence
  Description of Artificial Sequence: Synthetic oligonucleotide
tgtatgggccgcgctaagtctgtatgccgagcggttcagtcctggtggtgtcagtggtatcaagccggtcgcaactatgc

SEQ ID NO: 4275 - DNA, 80 bp, Artificial Sequence
  Description of Artificial Sequence: Synthetic oligonucleotide
tgtatgggccgcgctaagtctgtatgccgagcggttcagtgcttactgctgggattggcgcaagccggtcgcaactatgc

SEQ ID NO: 4276 - DNA, 80 bp, Artificial Sequence
  Description of Artificial Sequence: Synthetic oligonucleotide
tgtatgggccgcgctaagtctgtatgccgagcggttcagttaggggcagggtgtaatgcgcaagccggtcgcaactatgc

SEQ ID NO: 4277 - DNA, 80 bp, Artificial Sequence
  Description of Artificial Sequence: Synthetic oligonucleotide
tgtatgggccgcgctaagtctgtatgccgagcggttcagtaagtgggattaaagcgtgggcaagccggtcgcaactatgc

SEQ ID NO: 4278 - DNA, 80 bp, Artificial Sequence
  Description of Artificial Sequence: Synthetic oligonucleotide
tgtatgggccgcgctaagtctgtatgccgagcggttcagtagaatttccactcctgccgacaagccggtcgcaactatgc

SEQ ID NO: 4279 - DNA, 80 bp, Artificial Sequence
  Description of Artificial Sequence: Synthetic oligonucleotide
tgtatgggccgcgctaagtctgtatgccgagcggttcagtctgctgctcacaggaggttccaagccggtcgcaactatgc

SEQ ID NO: 4280 - DNA, 80 bp, Artificial Sequence
  Description of Artificial Sequence: Synthetic oligonucleotide
tgtatgggccgcgctaagtctgtatgccgagcggttcagtccaacggccaagatgagaaacaagccggtcgcaactatgc

SEQ ID NO: 4281 - DNA, 80 bp, Artificial Sequence
  Description of Artificial Sequence: Synthetic oligonucleotide
tgtatgggccgcgctaagtctgtatgccgagcggttcagtaagcctgcgtgatttctgagcaagccggtcgcaactatgc

SEQ ID NO: 4282 - DNA, 80 bp, Artificial Sequence
  Description of Artificial Sequence: Synthetic oligonucleotide
tgtatgggccgcgctaagtctgtatgccgagcggttcagtgaaagctgggttgttggagccaagccggtcgcaactatgc

SEQ ID NO: 4283 - DNA, 80 bp, Artificial Sequence
  Description of Artificial Sequence: Synthetic oligonucleotide
tgtatgggccgcgctaagtctgtatgccgagcggttcagtatagcaggatgggaatgccacaagccggtcgcaactatgc

SEQ ID NO: 4284 - DNA, 80 bp, Artificial Sequence
  Description of Artificial Sequence: Synthetic oligonucleotide
tgtatgggccgcgctaagtctgtatgccgagcggttcagttgccctatgtgcaggaattgcaagccggtcgcaactatgc

SEQ ID NO: 4285 - DNA, 80 bp, Artificial Sequence
  Description of Artificial Sequence: Synthetic oligonucleotide
tgtatgggccgcgctaagtctgtatgccgagcggttcagttgtacaatagagggcagcctcaagccggtcgcaactatgc

SEQ ID NO: 4286 - DNA, 80 bp, Artificial Sequence
  Description of Artificial Sequence: Synthetic oligonucleotide
tgtatgggccgcgctaagtctgtatgccgagcggttcagtcctgcactaggccacttagacaagccggtcgcaactatgc

SEQ ID NO: 4287 - DNA, 80 bp, Artificial Sequence
  Description of Artificial Sequence: Synthetic oligonucleotide
tgtatgggccgcgctaagtctgtatgccgagcggttcagtaatggggcgctgttcattctcaagccggtcgcaactatgc

SEQ ID NO: 4288 - DNA, 80 bp, Artificial Sequence
  Description of Artificial Sequence: Synthetic oligonucleotide
tgtatgggccgcgctaagtctgtatgccgagcggttcagtcttgtacccctggatcctctcaagccggtcgcaactatgc

SEQ ID NO: 4289 - DNA, 80 bp, Artificial Sequence
  Description of Artificial Sequence: Synthetic oligonucleotide
tgtatgggccgcgctaagtctgtatgccgagcggttcagtttctacacaggggcaccatgcaagccggtcgcaactatgc

SEQ ID NO: 4290 - DNA, 80 bp, Artificial Sequence
  Description of Artificial Sequence: Synthetic oligonucleotide
tgtatgggccgcgctaagtctgtatgccgagcggttcagtatgacaggccgagatgctcacaagccggtcgcaactatgc

SEQ ID NO: 4291 - DNA, 80 bp, Artificial Sequence
  Description of Artificial Sequence: Synthetic oligonucleotide
tgtatgggccgcgctaagtctgtatgccgagcggttcagtaggctctgttaccacactggcaagccggtcgcaactatgc

SEQ ID NO: 4292 - DNA, 80 bp, Artificial Sequence
  Description of Artificial Sequence: Synthetic oligonucleotide
tgtatgggccgcgctaagtctgtatgccgagcggttcagtaggaggaacatatggccagacaagccggtcgcaactatgc

SEQ ID NO: 4293 - DNA, 80 bp, Artificial Sequence
  Description of Artificial Sequence: Synthetic oligonucleotide
tgtatgggccgcgctaagtctgtatgccgagcggttcagttggaaatcaggtggtgcatgcaagccggtcgcaactatgc

SEQ ID NO: 4294 - DNA, 80 bp, Artificial Sequence
  Description of Artificial Sequence: Synthetic oligonucleotide
tgtatgggccgcgctaagtctgtatgccgagcggttcagtttgtgacggagccaacaagccaagccggtcgcaactatgc

SEQ ID NO: 4295 - DNA, 80 bp, Artificial Sequence
  Description of Artificial Sequence: Synthetic oligonucleotide
tgtatgggccgcgctaagtctgtatgccgagcggttcagtgctgtgcctggcgcgactctcaagccggtcgcaactatgc

SEQ ID NO: 4296 - DNA, 80 bp, Artificial Sequence
  Description of Artificial Sequence: Synthetic oligonucleotide
tgtatgggccgcgctaagtctgtatgccgagcggttcagttgactattgtggcagggactcaagccggtcgcaactatgc

SEQ ID NO: 4297 - DNA, 80 bp, Artificial Sequence
  Description of Artificial Sequence: Synthetic oligonucleotide
tgtatgggccgcgctaagtctgtatgccgagcggttcagttgctgtgcacaatccacctccaagccggtcgcaactatgc

SEQ ID NO: 4298 - DNA, 80 bp, Artificial Sequence
  Description of Artificial Sequence: Synthetic oligonucleotide
tgtatgggccgcgctaagtctgtatgccgagcggttcagtatatgtcctgaagctgcccacaagccggtcgcaactatgc

SEQ ID NO: 4299 - DNA, 80 bp, Artificial Sequence
  Description of Artificial Sequence: Synthetic oligonucleotide
tgtatgggccgcgctaagtctgtatgccgagcggttcagtagtcattctgtagccccactcaagccggtcgcaactatgc

SEQ ID NO: 4300 - DNA, 80 bp, Artificial Sequence
  Description of Artificial Sequence: Synthetic oligonucleotide
tgtatgggccgcgctaagtctgtatgccgagcggttcagttatcggcgccaagcaggtggcaagccggtcgcaactatgc

SEQ ID NO: 4301 - DNA, 80 bp, Artificial Sequence
  Description of Artificial Sequence: Synthetic oligonucleotide
tgtatgggccgcgctaagtctgtatgccgagcggttcagtccggtctggttccacttgaccaagccggtcgcaactatgc

SEQ ID NO: 4302 - DNA, 80 bp, Artificial Sequence
  Description of Artificial Sequence: Synthetic oligonucleotide
tgtatgggccgcgctaagtctgtatgccgagcggttcagtaggtggagtgatttggagctcaagccggtcgcaactatgc

SEQ ID NO: 4303 - DNA, 80 bp, Artificial Sequence
  Description of Artificial Sequence: Synthetic oligonucleotide
tgtatgggccgcgctaagtctgtatgccgagcggttcagttaaagctacagtggggctggcaagccggtcgcaactatgc

SEQ ID NO: 4304 - DNA, 80 bp, Artificial Sequence
  Description of Artificial Sequence: Synthetic oligonucleotide
tgtatgggccgcgctaagtctgtatgccgagcggttcagtgtggaatggataggcaacgccaagccggtcgcaactatgc

SEQ ID NO: 4305 - DNA, 80 bp, Artificial Sequence
  Description of Artificial Sequence: Synthetic oligonucleotide
tgtatgggccgcgctaagtctgtatgccgagcggttcagtaggcatgaagcatggacatccaagccggtcgcaactatgc

SEQ ID NO: 4306 - DNA, 80 bp, Artificial Sequence
  Description of Artificial Sequence: Synthetic oligonucleotide
tgtatgggccgcgctaagtctgtatgccgagcggttcagtaaggtgtgcttcagctttggcaagccggtcgcaactatgc

SEQ ID NO: 4307 - DNA, 80 bp, Artificial Sequence
  Description of Artificial Sequence: Synthetic oligonucleotide
tgtatgggccgcgctaagtctgtatgccgagcggttcagttgcacccagtctagcactttcaagccggtcgcaactatgc

SEQ ID NO: 4308 - DNA, 80 bp, Artificial Sequence
  Description of Artificial Sequence: Synthetic oligonucleotide
tgtatgggccgcgctaagtctgtatgccgagcggttcagtacagtggtggatgagggaagcaagccggtcgcaactatgc

SEQ ID NO: 4309 - DNA, 80 bp, Artificial Sequence
  Description of Artificial Sequence: Synthetic oligonucleotide
tgtatgggccgcgctaagtctgtatgccgagcggttcagtctccagtggctgttgctgatcaagccggtcgcaactatgc

SEQ ID NO: 4310 - DNA, 80 bp, Artificial Sequence
  Description of Artificial Sequence: Synthetic oligonucleotide
tgtatgggccgcgctaagtctgtatgccgagcggttcagtagcatcctaggataccgcttcaagccggtcgcaactatgc

SEQ ID NO: 4311 - DNA, 80 bp, Artificial Sequence
  Description of Artificial Sequence: Synthetic oligonucleotide
tgtatgggccgcgctaagtctgtatgccgagcggttcagtgtctcagaaaagcacggaggcaagccggtcgcaactatgc

SEQ ID NO: 4312 - DNA, 80 bp, Artificial Sequence
  Description of Artificial Sequence: Synthetic oligonucleotide
tgtatgggccgcgctaagtctgtatgccgagcggttcagtctcgtcagctgcctacttctcaagccggtcgcaactatgc

SEQ ID NO: 4313 - DNA, 80 bp, Artificial Sequence
  Description of Artificial Sequence: Synthetic oligonucleotide
tgtatgggccgcgctaagtctgtatgccgagcggttcagtaggtgatagcactggacacacaagccggtcgcaactatgc

SEQ ID NO: 4314 - DNA, 80 bp, Artificial Sequence
  Description of Artificial Sequence: Synthetic oligonucleotide
tgtatgggccgcgctaagtctgtatgccgagcggttcagtacaattcctagggctctccacaagccggtcgcaactatgc

SEQ ID NO: 4315 - DNA, 80 bp, Artificial Sequence
  Description of Artificial Sequence: Synthetic oligonucleotide
tgtatgggccgcgctaagtctgtatgccgagcggttcagtactaagttgtgggtttgggccaagccggtcgcaactatgc

SEQ ID NO: 4316 - DNA, 80 bp, Artificial Sequence
  Description of Artificial Sequence: Synthetic oligonucleotide
tgtatgggccgcgctaagtctgtatgccgagcggttcagtgtcaaggacctcagggagatcaagccggtcgcaactatgc

SEQ ID NO: 4317 - DNA, 80 bp, Artificial Sequence
  Description of Artificial Sequence: Synthetic oligonucleotide
tgtatgggccgcgctaagtctgtatgccgagcggttcagttttcagccttcaccacgaggcaagccggtcgcaactatgc

SEQ ID NO: 4318 - DNA, 80 bp, Artificial Sequence
  Description of Artificial Sequence: Synthetic oligonucleotide
tgtatgggccgcgctaagtctgtatgccgagcggttcagttcgctttccttcaggctcatcaagccggtcgcaactatgc

SEQ ID NO: 4319 - DNA, 80 bp, Artificial Sequence
  Description of Artificial Sequence: Synthetic oligonucleotide
tgtatgggccgcgctaagtctgtatgccgagcggttcagtgaggagggtgccatacactgcaagccggtcgcaactatgc

SEQ ID NO: 4320 - DNA, 80 bp, Artificial Sequence
  Description of Artificial Sequence: Synthetic oligonucleotide
tgtatgggccgcgctaagtctgtatgccgagcggttcagtgacgcgcgtcgaattctgggcaagccggtcgcaactatgc

SEQ ID NO: 4321 - DNA, 80 bp, Artificial Sequence
  Description of Artificial Sequence: Synthetic oligonucleotide
tgtatgggccgcgctaagtctgtatgccgagcggttcagtcctctccagggacctcttgtcaagccggtcgcaactatgc

SEQ ID NO: 4322 - DNA, 80 bp, Artificial Sequence
  Description of Artificial Sequence: Synthetic oligonucleotide
tgtatgggccgcgctaagtctgtatgccgagcggttcagttggggtcagaggttaccagacaagccggtcgcaactatgc

SEQ ID NO: 4323 - DNA, 80 bp, Artificial Sequence
  Description of Artificial Sequence: Synthetic oligonucleotide
tgtatgggccgcgctaagtctgtatgccgagcggttcagtcagctcaggtactggcaaaccaagccggtcgcaactatgc

SEQ ID NO: 4324 - DNA, 80 bp, Artificial Sequence
  Description of Artificial Sequence: Synthetic oligonucleotide
tgtatgggccgcgctaagtctgtatgccgagcggttcagttccccgcatacatccgtagacaagccggtcgcaactatgc

SEQ ID NO: 4325 - DNA, 80 bp, Artificial Sequence
  Description of Artificial Sequence: Synthetic oligonucleotide
tgtatgggccgcgctaagtctgtatgccgagcggttcagtaggacttggcaaccttcactcaagccggtcgcaactatgc

SEQ ID NO: 4326 - DNA, 80 bp, Artificial Sequence
  Description of Artificial Sequence: Synthetic oligonucleotide
tgtatgggccgcgctaagtcagccggttcgtcaagtagcacaggtagctggagccatgatcaagccggtcgcaactatgc

SEQ ID NO: 4327 - DNA, 80 bp, Artificial Sequence
  Description of Artificial Sequence: Synthetic oligonucleotide
tgtatgggccgcgctaagtcagccggttcgtcaagtagcaaaaccacaggcctggctagccaagccggtcgcaactatgc

SEQ ID NO: 4328 - DNA, 80 bp, Artificial Sequence
  Description of Artificial Sequence: Synthetic oligonucleotide
tgtatgggccgcgctaagtcagccggttcgtcaagtagcatctgtcaaacaactggcctgcaagccggtcgcaactatgc

SEQ ID NO: 4329 - DNA, 80 bp, Artificial Sequence
  Description of Artificial Sequence: Synthetic oligonucleotide
tgtatgggccgcgctaagtcagccggttcgtcaagtagcatacatgctctctcctccgcccaagccggtcgcaactatgc

SEQ ID NO: 4330 - DNA, 80 bp, Artificial Sequence
  Description of Artificial Sequence: Synthetic oligonucleotide
tgtatgggccgcgctaagtcagccggttcgtcaagtagcagaactcctaaggcccttgggcaagccggtcgcaactatgc

SEQ ID NO: 4331 - DNA, 80 bp, Artificial Sequence
  Description of Artificial Sequence: Synthetic oligonucleotide
tgtatgggccgcgctaagtcagccggttcgtcaagtagcaagagtcccagatcagtgacccaagccggtcgcaactatgc

SEQ ID NO: 4332 - DNA, 80 bp, Artificial Sequence
  Description of Artificial Sequence: Synthetic oligonucleotide
tgtatgggccgcgctaagtcagccggttcgtcaagtagcaggttggcatctacctttgggcaagccggtcgcaactatgc

SEQ ID NO: 4333 - DNA, 80 bp, Artificial Sequence
  Description of Artificial Sequence: Synthetic oligonucleotide
tgtatgggccgcgctaagtcagccggttcgtcaagtagcaaggctggaccctaagaagagcaagccggtcgcaactatgc

SEQ ID NO: 4334 - DNA, 80 bp, Artificial Sequence
  Description of Artificial Sequence: Synthetic oligonucleotide
tgtatgggccgcgctaagtcagccggttcgtcaagtagcattaaccaggctcccaggaaacaagccggtcgcaactatgc

SEQ ID NO: 4335 - DNA, 80 bp, Artificial Sequence
  Description of Artificial Sequence: Synthetic oligonucleotide
tgtatgggccgcgctaagtcagccggttcgtcaagtagcacacagccctcaattgaaccccaagccggtcgcaactatgc

SEQ ID NO: 4336 - DNA, 80 bp, Artificial Sequence
  Description of Artificial Sequence: Synthetic oligonucleotide
tgtatgggccgcgctaagtcagccggttcgtcaagtagcatacaggtggtcttgatggggcaagccggtcgcaactatgc

SEQ ID NO: 4337 - DNA, 80 bp, Artificial Sequence
  Description of Artificial Sequence: Synthetic oligonucleotide
tgtatgggccgcgctaagtcagccggttcgtcaagtagcattttctaggcggcaaagtgccaagccggtcgcaactatgc

SEQ ID NO: 4338 - DNA, 80 bp, Artificial Sequence
  Description of Artificial Sequence: Synthetic oligonucleotide
tgtatgggccgcgctaagtcagccggttcgtcaagtagcatgggagtcatctctcagcagcaagccggtcgcaactatgc

SEQ ID NO: 4339 - DNA, 80 bp, Artificial Sequence
  Description of Artificial Sequence: Synthetic oligonucleotide
tgtatgggccgcgctaagtcagccggttcgtcaagtagcacaggctacccagggattcaacaagccggtcgcaactatgc

SEQ ID NO: 4340 - DNA, 80 bp, Artificial Sequence
  Description of Artificial Sequence: Synthetic oligonucleotide
tgtatgggccgcgctaagtcagccggttcgtcaagtagcactgggaatctgtgtgcctgacaagccggtcgcaactatgc

SEQ ID NO: 4341 - DNA, 80 bp, Artificial Sequence
  Description of Artificial Sequence: Synthetic oligonucleotide
tgtatgggccgcgctaagtcagccggttcgtcaagtagcactcaccccacgatagacactcaagccggtcgcaactatgc

SEQ ID NO: 4342 - DNA, 80 bp, Artificial Sequence
  Description of Artificial Sequence: Synthetic oligonucleotide
tgtatgggccgcgctaagtcagccggttcgtcaagtagcagggtgtagtagggtggagagcaagccggtcgcaactatgc

SEQ ID NO: 4343 - DNA, 80 bp, Artificial Sequence
  Description of Artificial Sequence: Synthetic oligonucleotide
tgtatgggccgcgctaagtcagccggttcgtcaagtagcaagcggaactttgcccggtttcaagccggtcgcaactatgc

SEQ ID NO: 4344 - DNA, 80 bp, Artificial Sequence
  Description of Artificial Sequence: Synthetic oligonucleotide
tgtatgggccgcgctaagtcagccggttcgtcaagtagcactttgaggggagctggtcagcaagccggtcgcaactatgc

SEQ ID NO: 4345 - DNA, 80 bp, Artificial Sequence
  Description of Artificial Sequence: Synthetic oligonucleotide
tgtatgggccgcgctaagtcagccggttcgtcaagtagcaaggggttgtagtgatgcaggcaagccggtcgcaactatgc

SEQ ID NO: 4346 - DNA, 80 bp, Artificial Sequence
  Description of Artificial Sequence: Synthetic oligonucleotide
tgtatgggccgcgctaagtcagccggttcgtcaagtagcaaggagctgcagtttacaggtcaagccggtcgcaactatgc

SEQ ID NO: 4347 - DNA, 80 bp, Artificial Sequence
  Description of Artificial Sequence: Synthetic oligonucleotide
tgtatgggccgcgctaagtcagccggttcgtcaagtagcaactggaagctcgaaacaggacaagccggtcgcaactatgc

SEQ ID NO: 4348 - DNA, 80 bp, Artificial Sequence
  Description of Artificial Sequence: Synthetic oligonucleotide
tgtatgggccgcgctaagtcagccggttcgtcaagtagcaaggtattgatctgccccacccaagccggtcgcaactatgc

SEQ ID NO: 4349 - DNA, 80 bp, Artificial Sequence
  Description of Artificial Sequence: Synthetic oligonucleotide
tgtatgggccgcgctaagtcagccggttcgtcaagtagcaagttcccatgacaagtccctcaagccggtcgcaactatgc

SEQ ID NO: 4350 - DNA, 80 bp, Artificial Sequence
  Description of Artificial Sequence: Synthetic oligonucleotide
tgtatgggccgcgctaagtcagccggttcgtcaagtagcaagaccaatggctgcaatgttcaagccggtcgcaactatgc

SEQ ID NO: 4351 - DNA, 80 bp, Artificial Sequence
  Description of Artificial Sequence: Synthetic oligonucleotide
tgtatgggccgcgctaagtcagccggttcgtcaagtagcaggtctgatttcctgccttgccaagccggtcgcaactatgc

SEQ ID NO: 4352 - DNA, 80 bp, Artificial Sequence
  Description of Artificial Sequence: Synthetic oligonucleotide
tgtatgggccgcgctaagtcagccggttcgtcaagtagcactgtggcatcttgagacccacaagccggtcgcaactatgc

SEQ ID NO: 4353 - DNA, 80 bp, Artificial Sequence
  Description of Artificial Sequence: Synthetic oligonucleotide
tgtatgggccgcgctaagtcagccggttcgtcaagtagcaggcagactcggggcttctgtcaagccggtcgcaactatgc

SEQ ID NO: 4354 - DNA, 80 bp, Artificial Sequence
  Description of Artificial Sequence: Synthetic oligonucleotide
tgtatgggccgcgctaagtcagccggttcgtcaagtagcatttgcaggctcctgaatgtgcaagccggtcgcaactatgc

SEQ ID NO: 4355 - DNA, 80 bp, Artificial Sequence
  Description of Artificial Sequence: Synthetic oligonucleotide
tgtatgggccgcgctaagtcagccggttcgtcaagtagcatgactccttctcactagggccaagccggtcgcaactatgc

SEQ ID NO: 4356 - DNA, 80 bp, Artificial Sequence
  Description of Artificial Sequence: Synthetic oligonucleotide
tgtatgggccgcgctaagtcagccggttcgtcaagtagcaccctctggactggaaccacacaagccggtcgcaactatgc

SEQ ID NO: 4357 - DNA, 80 bp, Artificial Sequence
  Description of Artificial Sequence: Synthetic oligonucleotide
tgtatgggccgcgctaagtcagccggttcgtcaagtagcaatagtgagactgggcctgttcaagccggtcgcaactatgc

SEQ ID NO: 4358 - DNA, 80 bp, Artificial Sequence
  Description of Artificial Sequence: Synthetic oligonucleotide
tgtatgggccgcgctaagtcagccggttcgtcaagtagcatctcccttggctctagcgatcaagccggtcgcaactatgc

SEQ ID NO: 4359 - DNA, 80 bp, Artificial Sequence
  Description of Artificial Sequence: Synthetic oligonucleotide
tgtatgggccgcgctaagtcagccggttcgtcaagtagcatcttctgagaggtgcgctttcaagccggtcgcaactatgc

SEQ ID NO: 4360 - DNA, 80 bp, Artificial Sequence
  Description of Artificial Sequence: Synthetic oligonucleotide
tgtatgggccgcgctaagtcagccggttcgtcaagtagcaactaggagactggcacaagccaagccggtcgcaactatgc

SEQ ID NO: 4361 - DNA, 80 bp, Artificial Sequence
  Description of Artificial Sequence: Synthetic oligonucleotide
tgtatgggccgcgctaagtcagccggttcgtcaagtagcacttcacactctgcacttccccaagccggtcgcaactatgc

SEQ ID NO: 4362 - DNA, 80 bp, Artificial Sequence
  Description of Artificial Sequence: Synthetic oligonucleotide
tgtatgggccgcgctaagtcagccggttcgtcaagtagcaagcttggctgggaagcatatcaagccggtcgcaactatgc

SEQ ID NO: 4363 - DNA, 80 bp, Artificial Sequence
  Description of Artificial Sequence: Synthetic oligonucleotide
tgtatgggccgcgctaagtcagccggttcgtcaagtagcatctctagcccaagtgtggagcaagccggtcgcaactatgc

SEQ ID NO: 4364 - DNA, 80 bp, Artificial Sequence
  Description of Artificial Sequence: Synthetic oligonucleotide
tgtatgggccgcgctaagtcagccggttcgtcaagtagcatatggccgctacagtccaagcaagccggtcgcaactatgc

SEQ ID NO: 4365 - DNA, 80 bp, Artificial Sequence
  Description of Artificial Sequence: Synthetic oligonucleotide
tgtatgggccgcgctaagtcagccggttcgtcaagtagcaagccgaagtgctcccacctccaagccggtcgcaactatgc

SEQ ID NO: 4366 - DNA, 80 bp, Artificial Sequence
  Description of Artificial Sequence: Synthetic oligonucleotide
tgtatgggccgcgctaagtcagccggttcgtcaagtagcactatgcttttgccagggaggcaagccggtcgcaactatgc

SEQ ID NO: 4367 - DNA, 80 bp, Artificial Sequence
  Description of Artificial Sequence: Synthetic oligonucleotide
tgtatgggccgcgctaagtcagccggttcgtcaagtagcaagatctgggatcccttcgtccaagccggtcgcaactatgc

SEQ ID NO: 4368 - DNA, 80 bp, Artificial Sequence
  Description of Artificial Sequence: Synthetic oligonucleotide
tgtatgggccgcgctaagtcagccggttcgtcaagtagcacctcagcatagtgagaggctcaagccggtcgcaactatgc

SEQ ID NO: 4369 - DNA, 80 bp, Artificial Sequence
  Description of Artificial Sequence: Synthetic oligonucleotide
tgtatgggccgcgctaagtcagccggttcgtcaagtagcaggaatgaggagagtcccacccaagccggtcgcaactatgc

SEQ ID NO: 4370 - DNA, 80 bp, Artificial Sequence
  Description of Artificial Sequence: Synthetic oligonucleotide
tgtatgggccgcgctaagtcagccggttcgtcaagtagcaagccccacgtcctgtcacatcaagccggtcgcaactatgc

SEQ ID NO: 4371 - DNA, 80 bp, Artificial Sequence
  Description of Artificial Sequence: Synthetic oligonucleotide
tgtatgggccgcgctaagtcagccggttcgtcaagtagcacagacctatcctggggccaccaagccggtcgcaactatgc

SEQ ID NO: 4372 - DNA, 80 bp, Artificial Sequence
  Description of Artificial Sequence: Synthetic oligonucleotide
tgtatgggccgcgctaagtcagccggttcgtcaagtagcaatgcacggctctccaagtaccaagccggtcgcaactatgc

SEQ ID NO: 4373 - DNA, 80 bp, Artificial Sequence
  Description of Artificial Sequence: Synthetic oligonucleotide
tgtatgggccgcgctaagtcagccggttcgtcaagtagcaaaatggaccaagaaaggggccaagccggtcgcaactatgc

SEQ ID NO: 4374 - DNA, 80 bp, Artificial Sequence
  Description of Artificial Sequence: Synthetic oligonucleotide
tgtatgggccgcgctaagtcagccggttcgtcaagtagcatggcccgtgtagaaccagaacaagccggtcgcaactatgc

SEQ ID NO: 4375 - DNA, 80 bp, Artificial Sequence
  Description of Artificial Sequence: Synthetic oligonucleotide
tgtatgggccgcgctaagtcagccggttcgtcaagtagcaccactcaacggccagaacgtcaagccggtcgcaactatgc

SEQ ID NO: 4376 - DNA, 80 bp, Artificial Sequence
  Description of Artificial Sequence: Synthetic oligonucleotide
tgtatgggccgcgctaagtcagccggttcgtcaagtagcacatcacagcagcccatcacacaagccggtcgcaactatgc

SEQ ID NO: 4377 - DNA, 80 bp, Artificial Sequence
  Description of Artificial Sequence: Synthetic oligonucleotide
tgtatgggccgcgctaagtcagccggttcgtcaagtagcacagtgatggagaccgaagcacaagccggtcgcaactatgc

SEQ ID NO: 4378 - DNA, 80 bp, Artificial Sequence
  Description of Artificial Sequence: Synthetic oligonucleotide
tgtatgggccgcgctaagtcagccggttcgtcaagtagcaattgatcgatgcatcccagccaagccggtcgcaactatgc

SEQ ID NO: 4379 - DNA, 80 bp, Artificial Sequence
  Description of Artificial Sequence: Synthetic oligonucleotide
tgtatgggccgcgctaagtcagccggttcgtcaagtagcattggcagcatcaatcacacgcaagccggtcgcaactatgc

SEQ ID NO: 4380 - DNA, 80 bp, Artificial Sequence
  Description of Artificial Sequence: Synthetic oligonucleotide
tgtatgggccgcgctaagtcagccggttcgtcaagtagcaaggtctcatcattccccagccaagccggtcgcaactatgc

SEQ ID NO: 4381 - DNA, 80 bp, Artificial Sequence
  Description of Artificial Sequence: Synthetic oligonucleotide
tgtatgggccgcgctaagtcagccggttcgtcaagtagcatgtgctctgggtgctgaactcaagccggtcgcaactatgc

SEQ ID NO: 4382 - DNA, 80 bp, Artificial Sequence
  Description of Artificial Sequence: Synthetic oligonucleotide
tgtatgggccgcgctaagtcagccggttcgtcaagtagcaacaccaaggatcagcacagacaagccggtcgcaactatgc

SEQ ID NO: 4383 - DNA, 80 bp, Artificial Sequence
  Description of Artificial Sequence: Synthetic oligonucleotide
tgtatgggccgcgctaagtcagccggttcgtcaagtagcaagccatcatgagagggatgacaagccggtcgcaactatgc

SEQ ID NO: 4384 - DNA, 80 bp, Artificial Sequence
  Description of Artificial Sequence: Synthetic oligonucleotide
tgtatgggccgcgctaagtcagccggttcgtcaagtagcagcttcagactgacatgccctcaagccggtcgcaactatgc

SEQ ID NO: 4385 - DNA, 80 bp, Artificial Sequence
  Description of Artificial Sequence: Synthetic oligonucleotide
tgtatgggccgcgctaagtcagccggttcgtcaagtagcattatgcatgggcctgagtctcaagccggtcgcaactatgc

SEQ ID NO: 4386 - DNA, 80 bp, Artificial Sequence
  Description of Artificial Sequence: Synthetic oligonucleotide
tgtatgggccgcgctaagtcagccggttcgtcaagtagcaacgttccacagtatccagctcaagccggtcgcaactatgc

SEQ ID NO: 4387 - DNA, 80 bp, Artificial Sequence
  Description of Artificial Sequence: Synthetic oligonucleotide
tgtatgggccgcgctaagtcagccggttcgtcaagtagcatgaggtgtggtggccatcctcaagccggtcgcaactatgc

SEQ ID NO: 4388 - DNA, 80 bp, Artificial Sequence
  Description of Artificial Sequence: Synthetic oligonucleotide
tgtatgggccgcgctaagtcagccggttcgtcaagtagcagttttcttttcggggaggggcaagccggtcgcaactatgc

SEQ ID NO: 4389 - DNA, 80 bp, Artificial Sequence
  Description of Artificial Sequence: Synthetic oligonucleotide
tgtatgggccgcgctaagtcagccggttcgtcaagtagcacccaagcctaagaccctgcacaagccggtcgcaactatgc

SEQ ID NO: 4390 - DNA, 80 bp, Artificial Sequence
  Description of Artificial Sequence: Synthetic oligonucleotide
tgtatgggccgcgctaagtcagccggttcgtcaagtagcaatagtgggagaactgtggggcaagccggtcgcaactatgc

SEQ ID NO: 4391 - DNA, 80 bp, Artificial Sequence
  Description of Artificial Sequence: Synthetic oligonucleotide
tgtatgggccgcgctaagtcagccggttcgtcaagtagcagcttcacagggacatactgccaagccggtcgcaactatgc

SEQ ID NO: 4392 - DNA, 80 bp, Artificial Sequence
  Description of Artificial Sequence: Synthetic oligonucleotide
tgtatgggccgcgctaagtcagccggttcgtcaagtagcaagaccttggcactctctgatcaagccggtcgcaactatgc

SEQ ID NO: 4393 - DNA, 80 bp, Artificial Sequence
  Description of Artificial Sequence: Synthetic oligonucleotide
tgtatgggccgcgctaagtcagccggttcgtcaagtagcatctgctgagaggggaagtttcaagccggtcgcaactatgc

SEQ ID NO: 4394 - DNA, 80 bp, Artificial Sequence
  Description of Artificial Sequence: Synthetic oligonucleotide
tgtatgggccgcgctaagtcagccggttcgtcaagtagcatgctgcgtaaatgtcttgcccaagccggtcgcaactatgc

SEQ ID NO: 4395 - DNA, 80 bp, Artificial Sequence
  Description of Artificial Sequence: Synthetic oligonucleotide
tgtatgggccgcgctaagtcagccggttcgtcaagtagcactcaatctccatgccactgccaagccggtcgcaactatgc

SEQ ID NO: 4396 - DNA, 80 bp, Artificial Sequence
  Description of Artificial Sequence: Synthetic oligonucleotide
tgtatgggccgcgctaagtcagccggttcgtcaagtagcaggtttgttccaccacttccccaagccggtcgcaactatgc

SEQ ID NO: 4397 - DNA, 80 bp, Artificial Sequence
  Description of Artificial Sequence: Synthetic oligonucleotide
tgtatgggccgcgctaagtcagccggttcgtcaagtagcactgctcgccgcggggaaagacaagccggtcgcaactatgc

SEQ ID NO: 4398 - DNA, 80 bp, Artificial Sequence
  Description of Artificial Sequence: Synthetic oligonucleotide
tgtatgggccgcgctaagtcagccggttcgtcaagtagcaccacccgctggctcctctgtcaagccggtcgcaactatgc

SEQ ID NO: 4399 - DNA, 80 bp, Artificial Sequence
  Description of Artificial Sequence: Synthetic oligonucleotide
tgtatgggccgcgctaagtcagccggttcgtcaagtagcaatccagatggcaaacacacccaagccggtcgcaactatgc

SEQ ID NO: 4400 - DNA, 80 bp, Artificial Sequence
  Description of Artificial Sequence: Synthetic oligonucleotide
tgtatgggccgcgctaagtcagccggttcgtcaagtagcattctgtgtgaagcaagcctccaagccggtcgcaactatgc

SEQ ID NO: 4401 - DNA, 80 bp, Artificial Sequence
  Description of Artificial Sequence: Synthetic oligonucleotide
tgtatgggccgcgctaagtcagccggttcgtcaagtagcaggttaaaggggttctgccgacaagccggtcgcaactatgc

SEQ ID NO: 4402 - DNA, 80 bp, Artificial Sequence
  Description of Artificial Sequence: Synthetic oligonucleotide
tgtatgggccgcgctaagtcagccggttcgtcaagtagcattgggattctcactgtgggacaagccggtcgcaactatgc

SEQ ID NO: 4403 - DNA, 80 bp, Artificial Sequence
  Description of Artificial Sequence: Synthetic oligonucleotide
tgtatgggccgcgctaagtcagccggttcgtcaagtagcagttatcaccagagcccggcacaagccggtcgcaactatgc

SEQ ID NO: 4404 - DNA, 80 bp, Artificial Sequence
  Description of Artificial Sequence: Synthetic oligonucleotide
tgtatgggccgcgctaagtcagccggttcgtcaagtagcatgatgctcatagaggctggacaagccggtcgcaactatgc

SEQ ID NO: 4405 - DNA, 80 bp, Artificial Sequence
  Description of Artificial Sequence: Synthetic oligonucleotide
tgtatgggccgcgctaagtcagccggttcgtcaagtagcactgtatttgggctcaggcagcaagccggtcgcaactatgc

SEQ ID NO: 4406 - DNA, 80 bp, Artificial Sequence
  Description of Artificial Sequence: Synthetic oligonucleotide
tgtatgggccgcgctaagtcagccggttcgtcaagtagcaaaacaagtgcccgtttcagacaagccggtcgcaactatgc

SEQ ID NO: 4407 - DNA, 80 bp, Artificial Sequence
  Description of Artificial Sequence: Synthetic oligonucleotide
tgtatgggccgcgctaagtcagccggttcgtcaagtagcacaggaagggcacagactttgcaagccggtcgcaactatgc

SEQ ID NO: 4408 - DNA, 80 bp, Artificial Sequence
  Description of Artificial Sequence: Synthetic oligonucleotide
tgtatgggccgcgctaagtcagccggttcgtcaagtagcactcagggaggctacctttcacaagccggtcgcaactatgc

SEQ ID NO: 4409 - DNA, 80 bp, Artificial Sequence
  Description of Artificial Sequence: Synthetic oligonucleotide
tgtatgggccgcgctaagtcagccggttcgtcaagtagcacccctgcaaattcatgctgacaagccggtcgcaactatgc

SEQ ID NO: 4410 - DNA, 80 bp, Artificial Sequence
  Description of Artificial Sequence: Synthetic oligonucleotide
tgtatgggccgcgctaagtcagccggttcgtcaagtagcaaagggaagaagcgagagtctcaagccggtcgcaactatgc

SEQ ID NO: 4411 - DNA, 80 bp, Artificial Sequence
  Description of Artificial Sequence: Synthetic oligonucleotide
tgtatgggccgcgctaagtcagccggttcgtcaagtagcattgtgggactcaaaaggccacaagccggtcgcaactatgc

SEQ ID NO: 4412 - DNA, 80 bp, Artificial Sequence
  Description of Artificial Sequence: Synthetic oligonucleotide
tgtatgggccgcgctaagtcagccggttcgtcaagtagcaggaccaatctcgcaaactgccaagccggtcgcaactatgc

SEQ ID NO: 4413 - DNA, 80 bp, Artificial Sequence
  Description of Artificial Sequence: Synthetic oligonucleotide
tgtatgggccgcgctaagtcagccggttcgtcaagtagcatgctctgtgactgcaaaggccaagccggtcgcaactatgc

SEQ ID NO: 4414 - DNA, 80 bp, Artificial Sequence
  Description of Artificial Sequence: Synthetic oligonucleotide
tgtatgggccgcgctaagtcagccggttcgtcaagtagcatgaactgcatcacctggagccaagccggtcgcaactatgc

SEQ ID NO: 4415 - DNA, 80 bp, Artificial Sequence
  Description of Artificial Sequence: Synthetic oligonucleotide
tgtatgggccgcgctaagtcagccggttcgtcaagtagcactctgtaacggctggggttccaagccggtcgcaactatgc

SEQ ID NO: 4416 - DNA, 80 bp, Artificial Sequence
  Description of Artificial Sequence: Synthetic oligonucleotide
tgtatgggccgcgctaagtcagccggttcgtcaagtagcatgtcacagttgctggactctcaagccggtcgcaactatgc

SEQ ID NO: 4417 - DNA, 80 bp, Artificial Sequence
  Description of Artificial Sequence: Synthetic oligonucleotide
tgtatgggccgcgctaagtcagccggttcgtcaagtagcatgtagccttagagggttggccaagccggtcgcaactatgc

SEQ ID NO: 4418 - DNA, 80 bp, Artificial Sequence
  Description of Artificial Sequence: Synthetic oligonucleotide
tgtatgggccgcgctaagtcagccggttcgtcaagtagcaatgctaccctgctttcttgccaagccggtcgcaactatgc

SEQ ID NO: 4419 - DNA, 80 bp, Artificial Sequence
  Description of Artificial Sequence: Synthetic oligonucleotide
tgtatgggccgcgctaagtcagccggttcgtcaagtagcatgcttgattgtcctgaaggccaagccggtcgcaactatgc

SEQ ID NO: 4420 - DNA, 80 bp, Artificial Sequence
  Description of Artificial Sequence: Synthetic oligonucleotide
tgtatgggccgcgctaagtcagccggttcgtcaagtagcatttgtggaagtcgtgcagtgcaagccggtcgcaactatgc

SEQ ID NO: 4421 - DNA, 80 bp, Artificial Sequence
  Description of Artificial Sequence: Synthetic oligonucleotide
tgtatgggccgcgctaagtcagccggttcgtcaagtagcatccgcagagagcaccaggtgcaagccggtcgcaactatgc

SEQ ID NO: 4422 - DNA, 80 bp, Artificial Sequence
  Description of Artificial Sequence: Synthetic oligonucleotide
tgtatgggccgcgctaagtcagccggttcgtcaagtagcaggagtgaggagcaaggcaaccaagccggtcgcaactatgc

SEQ ID NO: 4423 - DNA, 80 bp, Artificial Sequence
  Description of Artificial Sequence: Synthetic oligonucleotide
tgtatgggccgcgctaagtcagccggttcgtcaagtagcacttttggtgtgacctgtggtcaagccggtcgcaactatgc

SEQ ID NO: 4424 - DNA, 80 bp, Artificial Sequence
  Description of Artificial Sequence: Synthetic oligonucleotide
tgtatgggccgcgctaagtcagccggttcgtcaagtagcaagtccaagcctcagaagcatcaagccggtcgcaactatgc

SEQ ID NO: 4425 - DNA, 80 bp, Artificial Sequence
  Description of Artificial Sequence: Synthetic oligonucleotide
tgtatgggccgcgctaagtcagccggttcgtcaagtagcaaagaaaggaagttcgcaggccaagccggtcgcaactatgc

SEQ ID NO: 4426 - DNA, 80 bp, Artificial Sequence
  Description of Artificial Sequence: Synthetic oligonucleotide
tgtatgggccgcgctaagtcagccggttcgtcaagtagcacacagggcatggcaggaggacaagccggtcgcaactatgc

SEQ ID NO: 4427 - DNA, 80 bp, Artificial Sequence
  Description of Artificial Sequence: Synthetic oligonucleotide
tgtatgggccgcgctaagtcagccggttcgtcaagtagcaaagaatttgagcagggcagccaagccggtcgcaactatgc

SEQ ID NO: 4428 - DNA, 80 bp, Artificial Sequence
  Description of Artificial Sequence: Synthetic oligonucleotide
tgtatgggccgcgctaagtcagccggttcgtcaagtagcaggagatggctggagctgtttcaagccggtcgcaactatgc

SEQ ID NO: 4429 - DNA, 80 bp, Artificial Sequence
  Description of Artificial Sequence: Synthetic oligonucleotide
tgtatgggccgcgctaagtcagccggttcgtcaagtagcactcttacagccctgccacctcaagccggtcgcaactatgc

SEQ ID NO: 4430 - DNA, 80 bp, Artificial Sequence
  Description of Artificial Sequence: Synthetic oligonucleotide
tgtatgggccgcgctaagtcagccggttcgtcaagtagcactagctccagtcagtcgtgacaagccggtcgcaactatgc

SEQ ID NO: 4431 - DNA, 80 bp, Artificial Sequence
  Description of Artificial Sequence: Synthetic oligonucleotide
tgtatgggccgcgctaagtcagccggttcgtcaagtagcaactctcatgtccctggaacccaagccggtcgcaactatgc

SEQ ID NO: 4432 - DNA, 80 bp, Artificial Sequence
  Description of Artificial Sequence: Synthetic oligonucleotide
tgtatgggccgcgctaagtcagccggttcgtcaagtagcagtcctgctaagctccattggcaagccggtcgcaactatgc

SEQ ID NO: 4433 - DNA, 80 bp, Artificial Sequence
  Description of Artificial Sequence: Synthetic oligonucleotide
tgtatgggccgcgctaagtcagccggttcgtcaagtagcaccactctggcttaggaggtgcaagccggtcgcaactatgc

SEQ ID NO: 4434 - DNA, 80 bp, Artificial Sequence
  Description of Artificial Sequence: Synthetic oligonucleotide
tgtatgggccgcgctaagtcagccggttcgtcaagtagcattacttgcttcgtcaggtgccaagccggtcgcaactatgc

SEQ ID NO: 4435 - DNA, 80 bp, Artificial Sequence
  Description of Artificial Sequence: Synthetic oligonucleotide
tgtatgggccgcgctaagtcagccggttcgtcaagtagcaccaggtttcctctctccgtccaagccggtcgcaactatgc

SEQ ID NO: 4436 - DNA, 80 bp, Artificial Sequence
  Description of Artificial Sequence: Synthetic oligonucleotide
tgtatgggccgcgctaagtcagccggttcgtcaagtagcattctgcctcagcgctttgcccaagccggtcgcaactatgc

SEQ ID NO: 4437 - DNA, 80 bp, Artificial Sequence
  Description of Artificial Sequence: Synthetic oligonucleotide
tgtatgggccgcgctaagtcagccggttcgtcaagtagcatggcctggaaatttgtcacccaagccggtcgcaactatgc

SEQ ID NO: 4438 - DNA, 80 bp, Artificial Sequence
  Description of Artificial Sequence: Synthetic oligonucleotide
tgtatgggccgcgctaagtcagccggttcgtcaagtagcaatccaaccacccagagcaatcaagccggtcgcaactatgc

SEQ ID NO: 4439 - DNA, 80 bp, Artificial Sequence
  Description of Artificial Sequence: Synthetic oligonucleotide
tgtatgggccgcgctaagtcagccggttcgtcaagtagcatcctgcagcacttaaggcctcaagccggtcgcaactatgc

SEQ ID NO: 4440 - DNA, 80 bp, Artificial Sequence
  Description of Artificial Sequence: Synthetic oligonucleotide
tgtatgggccgcgctaagtcagccggttcgtcaagtagcaatgtactggatctcctcggccaagccggtcgcaactatgc

SEQ ID NO: 4441 - DNA, 80 bp, Artificial Sequence
  Description of Artificial Sequence: Synthetic oligonucleotide
tgtatgggccgcgctaagtcagccggttcgtcaagtagcacactgaccaacccatccacacaagccggtcgcaactatgc

SEQ ID NO: 4442 - DNA, 80 bp, Artificial Sequence
  Description of Artificial Sequence: Synthetic oligonucleotide
tgtatgggccgcgctaagtcagccggttcgtcaagtagcagcggaggatcgtgcttcacacaagccggtcgcaactatgc

SEQ ID NO: 4443 - DNA, 80 bp, Artificial Sequence
  Description of Artificial Sequence: Synthetic oligonucleotide
tgtatgggccgcgctaagtcagccggttcgtcaagtagcatggaaacggaaacctcaggacaagccggtcgcaactatgc

SEQ ID NO: 4444 - DNA, 80 bp, Artificial Sequence
  Description of Artificial Sequence: Synthetic oligonucleotide
tgtatgggccgcgctaagtcagccggttcgtcaagtagcatcatccttcccgtagctgtgcaagccggtcgcaactatgc

SEQ ID NO: 4445 - DNA, 80 bp, Artificial Sequence
  Description of Artificial Sequence: Synthetic oligonucleotide
tgtatgggccgcgctaagtcagccggttcgtcaagtagcaacacttcatgcccaactgaccaagccggtcgcaactatgc

SEQ ID NO: 4446 - DNA, 80 bp, Artificial Sequence
  Description of Artificial Sequence: Synthetic oligonucleotide
tgtatgggccgcgctaagtcagccggttcgtcaagtagcatgctccaataggacagagggcaagccggtcgcaactatgc

SEQ ID NO: 4447 - DNA, 80 bp, Artificial Sequence
  Description of Artificial Sequence: Synthetic oligonucleotide
tgtatgggccgcgctaagtctgtatgccgagcggttcagtatcttttcacgcctcctccacaagccggtcgcaactatgc

SEQ ID NO: 4448 - DNA, 80 bp, Artificial Sequence
  Description of Artificial Sequence: Synthetic oligonucleotide
tgtatgggccgcgctaagtctgtatgccgagcggttcagtgccagccatcttgcaagcgacaagccggtcgcaactatgc

SEQ ID NO: 4449 - DNA, 80 bp, Artificial Sequence
  Description of Artificial Sequence: Synthetic oligonucleotide
tgtatgggccgcgctaagtctgtatgccgagcggttcagtcaatttggggcacgtgtacccaagccggtcgcaactatgc

SEQ ID NO: 4450 - DNA, 80 bp, Artificial Sequence
  Description of Artificial Sequence: Synthetic oligonucleotide
tgtatgggccgcgctaagtctgtatgccgagcggttcagtgcctcagagccagattccaacaagccggtcgcaactatgc

SEQ ID NO: 4451 - DNA, 80 bp, Artificial Sequence
  Description of Artificial Sequence: Synthetic oligonucleotide
tgtatgggccgcgctaagtctgtatgccgagcggttcagtgccatcaatgttgcaggtcacaagccggtcgcaactatgc

SEQ ID NO: 4452 - DNA, 80 bp, Artificial Sequence
  Description of Artificial Sequence: Synthetic oligonucleotide
tgtatgggccgcgctaagtctgtatgccgagcggttcagtgttgcactgacaggttccagcaagccggtcgcaactatgc

SEQ ID NO: 4453 - DNA, 80 bp, Artificial Sequence
  Description of Artificial Sequence: Synthetic oligonucleotide
tgtatgggccgcgctaagtctgtatgccgagcggttcagttggggttggggttaccgttgcaagccggtcgcaactatgc

SEQ ID NO: 4454 - DNA, 80 bp, Artificial Sequence
  Description of Artificial Sequence: Synthetic oligonucleotide
tgtatgggccgcgctaagtctgtatgccgagcggttcagtcgttgacgtgaatccacacccaagccggtcgcaactatgc

SEQ ID NO: 4455 - DNA, 80 bp, Artificial Sequence
  Description of Artificial Sequence: Synthetic oligonucleotide
tgtatgggccgcgctaagtctgtatgccgagcggttcagtagacgcctctgtctgagaagcaagccggtcgcaactatgc

SEQ ID NO: 4456 - DNA, 80 bp, Artificial Sequence
  Description of Artificial Sequence: Synthetic oligonucleotide
tgtatgggccgcgctaagtctgtatgccgagcggttcagtggggacacgcacattcattccaagccggtcgcaactatgc

SEQ ID NO: 4457 - DNA, 80 bp, Artificial Sequence
  Description of Artificial Sequence: Synthetic oligonucleotide
tgtatgggccgcgctaagtctgtatgccgagcggttcagtggaaattgcacactccagggcaagccggtcgcaactatgc

SEQ ID NO: 4458 - DNA, 80 bp, Artificial Sequence
  Description of Artificial Sequence: Synthetic oligonucleotide
tgtatgggccgcgctaagtctgtatgccgagcggttcagtgaaagttcgaaacccctccccaagccggtcgcaactatgc

SEQ ID NO: 4459 - DNA, 80 bp, Artificial Sequence
  Description of Artificial Sequence: Synthetic oligonucleotide
tgtatgggccgcgctaagtctgtatgccgagcggttcagttcgtgcattgctttctccagcaagccggtcgcaactatgc

SEQ ID NO: 4460 - DNA, 80 bp, Artificial Sequence
  Description of Artificial Sequence: Synthetic oligonucleotide
tgtatgggccgcgctaagtctgtatgccgagcggttcagtgcttccaaacacagccttgtcaagccggtcgcaactatgc

SEQ ID NO: 4461 - DNA, 80 bp, Artificial Sequence
  Description of Artificial Sequence: Synthetic oligonucleotide
tgtatgggccgcgctaagtctgtatgccgagcggttcagtctgtgcaccctgacctctaccaagccggtcgcaactatgc

SEQ ID NO: 4462 - DNA, 80 bp, Artificial Sequence
  Description of Artificial Sequence: Synthetic oligonucleotide
tgtatgggccgcgctaagtctgtatgccgagcggttcagttgcagtctctgggcatgctgcaagccggtcgcaactatgc

SEQ ID NO: 4463 - DNA, 80 bp, Artificial Sequence
  Description of Artificial Sequence: Synthetic oligonucleotide
tgtatgggccgcgctaagtctgtatgccgagcggttcagtaactgagggttcctgcacaacaagccggtcgcaactatgc

SEQ ID NO: 4464 - DNA, 80 bp, Artificial Sequence
  Description of Artificial Sequence: Synthetic oligonucleotide
tgtatgggccgcgctaagtctgtatgccgagcggttcagtccaccagtgggcaatttgttcaagccggtcgcaactatgc

SEQ ID NO: 4465 - DNA, 80 bp, Artificial Sequence
  Description of Artificial Sequence: Synthetic oligonucleotide
tgtatgggccgcgctaagtctgtatgccgagcggttcagttggcacattgctctctacctcaagccggtcgcaactatgc

SEQ ID NO: 4466 - DNA, 80 bp, Artificial Sequence
  Description of Artificial Sequence: Synthetic oligonucleotide
tgtatgggccgcgctaagtctgtatgccgagcggttcagtactcaaagcaacggattggccaagccggtcgcaactatgc

SEQ ID NO: 4467 - DNA, 80 bp, Artificial Sequence
  Description of Artificial Sequence: Synthetic oligonucleotide
tgtatgggccgcgctaagtctgtatgccgagcggttcagttcccactcctggaggaacctcaagccggtcgcaactatgc

SEQ ID NO: 4468 - DNA, 80 bp, Artificial Sequence
  Description of Artificial Sequence: Synthetic oligonucleotide
tgtatgggccgcgctaagtctgtatgccgagcggttcagtcaccccaccttgtcaatgaccaagccggtcgcaactatgc

SEQ ID NO: 4469 - DNA, 80 bp, Artificial Sequence
  Description of Artificial Sequence: Synthetic oligonucleotide
tgtatgggccgcgctaagtctgtatgccgagcggttcagtcctcctgcgtgccttggttacaagccggtcgcaactatgc

SEQ ID NO: 4470 - DNA, 80 bp, Artificial Sequence
  Description of Artificial Sequence: Synthetic oligonucleotide
tgtatgggccgcgctaagtctgtatgccgagcggttcagttgcctccccgctagcccagtcaagccggtcgcaactatgc

SEQ ID NO: 4471 - DNA, 80 bp, Artificial Sequence
  Description of Artificial Sequence: Synthetic oligonucleotide
tgtatgggccgcgctaagtctgtatgccgagcggttcagtacatctctcttcggcctcaacaagccggtcgcaactatgc

SEQ ID NO: 4472 - DNA, 80 bp, Artificial Sequence
  Description of Artificial Sequence: Synthetic oligonucleotide
tgtatgggccgcgctaagtctgtatgccgagcggttcagttgtaatagtcggcacgctggcaagccggtcgcaactatgc

SEQ ID NO: 4473 - DNA, 80 bp, Artificial Sequence
  Description of Artificial Sequence: Synthetic oligonucleotide
tgtatgggccgcgctaagtctgtatgccgagcggttcagtcactcattgtggcaaggcttcaagccggtcgcaactatgc

SEQ ID NO: 4474 - DNA, 80 bp, Artificial Sequence
  Description of Artificial Sequence: Synthetic oligonucleotide
tgtatgggccgcgctaagtctgtatgccgagcggttcagttgagccctattccctagctgcaagccggtcgcaactatgc

SEQ ID NO: 4475 - DNA, 80 bp, Artificial Sequence
  Description of Artificial Sequence: Synthetic oligonucleotide
tgtatgggccgcgctaagtctgtatgccgagcggttcagttgtgaagtgggtgctaccatcaagccggtcgcaactatgc

SEQ ID NO: 4476 - DNA, 80 bp, Artificial Sequence
  Description of Artificial Sequence: Synthetic oligonucleotide
tgtatgggccgcgctaagtctgtatgccgagcggttcagttccctaagtgagccagatcccaagccggtcgcaactatgc

SEQ ID NO: 4477 - DNA, 80 bp, Artificial Sequence
  Description of Artificial Sequence: Synthetic oligonucleotide
tgtatgggccgcgctaagtctgtatgccgagcggttcagtggtgtccccggaatgaagtgcaagccggtcgcaactatgc

SEQ ID NO: 4478 - DNA, 80 bp, Artificial Sequence
  Description of Artificial Sequence: Synthetic oligonucleotide
tgtatgggccgcgctaagtctgtatgccgagcggttcagtcagcaggcaggaagcttaaacaagccggtcgcaactatgc

SEQ ID NO: 4479 - DNA, 80 bp, Artificial Sequence
  Description of Artificial Sequence: Synthetic oligonucleotide
tgtatgggccgcgctaagtctgtatgccgagcggttcagtgccccttcctgatgtagagtcaagccggtcgcaactatgc

SEQ ID NO: 4480 - DNA, 80 bp, Artificial Sequence
  Description of Artificial Sequence: Synthetic oligonucleotide
tgtatgggccgcgctaagtctgtatgccgagcggttcagtagagaaccaggcacagatctcaagccggtcgcaactatgc

SEQ ID NO: 4481 - DNA, 80 bp, Artificial Sequence
  Description of Artificial Sequence: Synthetic oligonucleotide
tgtatgggccgcgctaagtctgtatgccgagcggttcagttgagatgggtggatgcttcacaagccggtcgcaactatgc

SEQ ID NO: 4482 - DNA, 80 bp, Artificial Sequence
  Description of Artificial Sequence: Synthetic oligonucleotide
tgtatgggccgcgctaagtctgtatgccgagcggttcagtccccttccatgttgcttcagcaagccggtcgcaactatgc

SEQ ID NO: 4483 - DNA, 80 bp, Artificial Sequence
  Description of Artificial Sequence: Synthetic oligonucleotide
tgtatgggccgcgctaagtctgtatgccgagcggttcagtgcagatgccaacaagcagtgcaagccggtcgcaactatgc

SEQ ID NO: 4484 - DNA, 80 bp, Artificial Sequence
  Description of Artificial Sequence: Synthetic oligonucleotide
tgtatgggccgcgctaagtctgtatgccgagcggttcagtcgcaagtcaggctccattctcaagccggtcgcaactatgc

SEQ ID NO: 4485 - DNA, 80 bp, Artificial Sequence
  Description of Artificial Sequence: Synthetic oligonucleotide
tgtatgggccgcgctaagtctgtatgccgagcggttcagtagcagcgaaaagaagcatgacaagccggtcgcaactatgc

SEQ ID NO: 4486 - DNA, 80 bp, Artificial Sequence
  Description of Artificial Sequence: Synthetic oligonucleotide
tgtatgggccgcgctaagtctgtatgccgagcggttcagttggcttctgagaatgggtcccaagccggtcgcaactatgc

SEQ ID NO: 4487 - DNA, 80 bp, Artificial Sequence
  Description of Artificial Sequence: Synthetic oligonucleotide
tgtatgggccgcgctaagtctgtatgccgagcggttcagtactgcattcactcttgcctgcaagccggtcgcaactatgc

SEQ ID NO: 4488 - DNA, 80 bp, Artificial Sequence
  Description of Artificial Sequence: Synthetic oligonucleotide
tgtatgggccgcgctaagtctgtatgccgagcggttcagttcgggtatcaagggagactgcaagccggtcgcaactatgc

SEQ ID NO: 4489 - DNA, 80 bp, Artificial Sequence
  Description of Artificial Sequence: Synthetic oligonucleotide
tgtatgggccgcgctaagtctgtatgccgagcggttcagtctcagtccaggcctaacacacaagccggtcgcaactatgc

SEQ ID NO: 4490 - DNA, 80 bp, Artificial Sequence
  Description of Artificial Sequence: Synthetic oligonucleotide
tgtatgggccgcgctaagtctgtatgccgagcggttcagtaacaggagttacatcgcccccaagccggtcgcaactatgc

SEQ ID NO: 4491 - DNA, 80 bp, Artificial Sequence
  Description of Artificial Sequence: Synthetic oligonucleotide
tgtatgggccgcgctaagtctgtatgccgagcggttcagtgtgtgcgcacctctgttggtcaagccggtcgcaactatgc

SEQ ID NO: 4492 - DNA, 80 bp, Artificial Sequence
  Description of Artificial Sequence: Synthetic oligonucleotide
tgtatgggccgcgctaagtctgtatgccgagcggttcagtcagctgctcattgggtactgcaagccggtcgcaactatgc

SEQ ID NO: 4493 - DNA, 80 bp, Artificial Sequence
  Description of Artificial Sequence: Synthetic oligonucleotide
tgtatgggccgcgctaagtctgtatgccgagcggttcagtctctttggagtgactgcacgcaagccggtcgcaactatgc

SEQ ID NO: 4494 - DNA, 80 bp, Artificial Sequence
  Description of Artificial Sequence: Synthetic oligonucleotide
tgtatgggccgcgctaagtctgtatgccgagcggttcagtttgaggtactccaagccacccaagccggtcgcaactatgc

SEQ ID NO: 4495 - DNA, 80 bp, Artificial Sequence
  Description of Artificial Sequence: Synthetic oligonucleotide
tgtatgggccgcgctaagtctgtatgccgagcggttcagtttccaggggattccaactcccaagccggtcgcaactatgc

SEQ ID NO: 4496 - DNA, 80 bp, Artificial Sequence
  Description of Artificial Sequence: Synthetic oligonucleotide
tgtatgggccgcgctaagtctgtatgccgagcggttcagtctcgcacccaagtcaggcctcaagccggtcgcaactatgc

SEQ ID NO: 4497 - DNA, 80 bp, Artificial Sequence
  Description of Artificial Sequence: Synthetic oligonucleotide
tgtatgggccgcgctaagtctgtatgccgagcggttcagtcttgcaggtggatgtgtcagcaagccggtcgcaactatgc

SEQ ID NO: 4498 - DNA, 80 bp, Artificial Sequence
  Description of Artificial Sequence: Synthetic oligonucleotide
tgtatgggccgcgctaagtctgtatgccgagcggttcagtttcttgcatgaacaggtggccaagccggtcgcaactatgc

SEQ ID NO: 4499 - DNA, 80 bp, Artificial Sequence
  Description of Artificial Sequence: Synthetic oligonucleotide
tgtatgggccgcgctaagtctgtatgccgagcggttcagtacctggatgtctgtgggagtcaagccggtcgcaactatgc

SEQ ID NO: 4500 - DNA, 80 bp, Artificial Sequence
  Description of Artificial Sequence: Synthetic oligonucleotide
tgtatgggccgcgctaagtctgtatgccgagcggttcagttccggtcggagggaatgacacaagccggtcgcaactatgc

SEQ ID NO: 4501 - DNA, 80 bp, Artificial Sequence
  Description of Artificial Sequence: Synthetic oligonucleotide
tgtatgggccgcgctaagtctgtatgccgagcggttcagtggccaggctcctgatggacacaagccggtcgcaactatgc

SEQ ID NO: 4502 - DNA, 80 bp, Artificial Sequence
  Description of Artificial Sequence: Synthetic oligonucleotide
tgtatgggccgcgctaagtctgtatgccgagcggttcagtactccgaagcaacacagtgccaagccggtcgcaactatgc

SEQ ID NO: 4503 - DNA, 80 bp, Artificial Sequence
  Description of Artificial Sequence: Synthetic oligonucleotide
tgtatgggccgcgctaagtctgtatgccgagcggttcagtcatcacaacatccaagcccacaagccggtcgcaactatgc

SEQ ID NO: 4504 - DNA, 80 bp, Artificial Sequence
  Description of Artificial Sequence: Synthetic oligonucleotide
tgtatgggccgcgctaagtctgtatgccgagcggttcagttatgtttgaccctccgcacccaagccggtcgcaactatgc

SEQ ID NO: 4505 - DNA, 80 bp, Artificial Sequence
  Description of Artificial Sequence: Synthetic oligonucleotide
tgtatgggccgcgctaagtctgtatgccgagcggttcagttaccaggcacagtcagaacacaagccggtcgcaactatgc

SEQ ID NO: 4506 - DNA, 80 bp, Artificial Sequence
  Description of Artificial Sequence: Synthetic oligonucleotide
tgtatgggccgcgctaagtctgtatgccgagcggttcagtttagcagtccccataccaggcaagccggtcgcaactatgc

SEQ ID NO: 4507 - DNA, 80 bp, Artificial Sequence
  Description of Artificial Sequence: Synthetic oligonucleotide
tgtatgggccgcgctaagtctgtatgccgagcggttcagtgcatggggctagggtcaggtcaagccggtcgcaactatgc

SEQ ID NO: 4508 - DNA, 80 bp, Artificial Sequence
  Description of Artificial Sequence: Synthetic oligonucleotide
tgtatgggccgcgctaagtctgtatgccgagcggttcagtaacctgaaggatacacgggacaagccggtcgcaactatgc

SEQ ID NO: 4509 - DNA, 80 bp, Artificial Sequence
  Description of Artificial Sequence: Synthetic oligonucleotide
tgtatgggccgcgctaagtctgtatgccgagcggttcagttgggccacaggatacctctgcaagccggtcgcaactatgc

SEQ ID NO: 4510 - DNA, 80 bp, Artificial Sequence
  Description of Artificial Sequence: Synthetic oligonucleotide
tgtatgggccgcgctaagtctgtatgccgagcggttcagtccagcctgacctagcaacaacaagccggtcgcaactatgc

SEQ ID NO: 4511 - DNA, 80 bp, Artificial Sequence
  Description of Artificial Sequence: Synthetic oligonucleotide
tgtatgggccgcgctaagtctgtatgccgagcggttcagttgcctatggatggatgagctcaagccggtcgcaactatgc

SEQ ID NO: 4512 - DNA, 80 bp, Artificial Sequence
  Description of Artificial Sequence: Synthetic oligonucleotide
tgtatgggccgcgctaagtctgtatgccgagcggttcagtttcccagagcctatggtcaacaagccggtcgcaactatgc

SEQ ID NO: 4513 - DNA, 80 bp, Artificial Sequence
  Description of Artificial Sequence: Synthetic oligonucleotide
tgtatgggccgcgctaagtctgtatgccgagcggttcagtagggtcacatatgctcgtggcaagccggtcgcaactatgc

SEQ ID NO: 4514 - DNA, 80 bp, Artificial Sequence
  Description of Artificial Sequence: Synthetic oligonucleotide
tgtatgggccgcgctaagtctgtatgccgagcggttcagtagtagtctgcatggtggtgccaagccggtcgcaactatgc

SEQ ID NO: 4515 - DNA, 80 bp, Artificial Sequence
  Description of Artificial Sequence: Synthetic oligonucleotide
tgtatgggccgcgctaagtctgtatgccgagcggttcagtaagacctcagttccaggcaccaagccggtcgcaactatgc

SEQ ID NO: 4516 - DNA, 80 bp, Artificial Sequence
  Description of Artificial Sequence: Synthetic oligonucleotide
tgtatgggccgcgctaagtctgtatgccgagcggttcagtccctcctggtcatggaaccacaagccggtcgcaactatgc

SEQ ID NO: 4517 - DNA, 80 bp, Artificial Sequence
  Description of Artificial Sequence: Synthetic oligonucleotide
tgtatgggccgcgctaagtctgtatgccgagcggttcagtcaatccccgggcacagtggtcaagccggtcgcaactatgc

SEQ ID NO: 4518 - DNA, 80 bp, Artificial Sequence
  Description of Artificial Sequence: Synthetic oligonucleotide
tgtatgggccgcgctaagtctgtatgccgagcggttcagtctttctctcgctggcttggacaagccggtcgcaactatgc

SEQ ID NO: 4519 - DNA, 80 bp, Artificial Sequence
  Description of Artificial Sequence: Synthetic oligonucleotide
tgtatgggccgcgctaagtctgtatgccgagcggttcagttgctccagcactcaaagagacaagccggtcgcaactatgc

SEQ ID NO: 4520 - DNA, 80 bp, Artificial Sequence
  Description of Artificial Sequence: Synthetic oligonucleotide
tgtatgggccgcgctaagtctgtatgccgagcggttcagtgattggcatttgttgggcggcaagccggtcgcaactatgc

SEQ ID NO: 4521 - DNA, 80 bp, Artificial Sequence
  Description of Artificial Sequence: Synthetic oligonucleotide
tgtatgggccgcgctaagtctgtatgccgagcggttcagttaacgggtactccaaaggggcaagccggtcgcaactatgc

SEQ ID NO: 4522 - DNA, 80 bp, Artificial Sequence
  Description of Artificial Sequence: Synthetic oligonucleotide
tgtatgggccgcgctaagtctgtatgccgagcggttcagttccaagccagattagaccctcaagccggtcgcaactatgc

SEQ ID NO: 4523 - DNA, 80 bp, Artificial Sequence
  Description of Artificial Sequence: Synthetic oligonucleotide
tgtatgggccgcgctaagtctgtatgccgagcggttcagttggggcaccatgtgactatacaagccggtcgcaactatgc

SEQ ID NO: 4524 - DNA, 80 bp, Artificial Sequence
  Description of Artificial Sequence: Synthetic oligonucleotide
tgtatgggccgcgctaagtctgtatgccgagcggttcagttcatttggagctacctgggtcaagccggtcgcaactatgc

SEQ ID NO: 4525 - DNA, 80 bp, Artificial Sequence
  Description of Artificial Sequence: Synthetic oligonucleotide
tgtatgggccgcgctaagtctgtatgccgagcggttcagtttgcaagtcttgtccttgggcaagccggtcgcaactatgc

SEQ ID NO: 4526 - DNA, 80 bp, Artificial Sequence
  Description of Artificial Sequence: Synthetic oligonucleotide
tgtatgggccgcgctaagtctgtatgccgagcggttcagtgttaagtcatgtgcagggcacaagccggtcgcaactatgc

SEQ ID NO: 4527 - DNA, 80 bp, Artificial Sequence
  Description of Artificial Sequence: Synthetic oligonucleotide
tgtatgggccgcgctaagtctgtatgccgagcggttcagtggggaaggacattttcagcacaagccggtcgcaactatgc

SEQ ID NO: 4528 - DNA, 80 bp, Artificial Sequence
  Description of Artificial Sequence: Synthetic oligonucleotide
tgtatgggccgcgctaagtctgtatgccgagcggttcagtagcacagcatgaagacgcaccaagccggtcgcaactatgc

SEQ ID NO: 4529 - DNA, 80 bp, Artificial Sequence
  Description of Artificial Sequence: Synthetic oligonucleotide
tgtatgggccgcgctaagtctgtatgccgagcggttcagtggcataaggtgggccaggatcaagccggtcgcaactatgc

SEQ ID NO: 4530 - DNA, 80 bp, Artificial Sequence
  Description of Artificial Sequence: Synthetic oligonucleotide
tgtatgggccgcgctaagtctgtatgccgagcggttcagttagctcagctagaagcagcacaagccggtcgcaactatgc

SEQ ID NO: 4531 - DNA, 80 bp, Artificial Sequence
  Description of Artificial Sequence: Synthetic oligonucleotide
tgtatgggccgcgctaagtctgtatgccgagcggttcagtagggaacctgcctgtagtttcaagccggtcgcaactatgc

SEQ ID NO: 4532 - DNA, 80 bp, Artificial Sequence
  Description of Artificial Sequence: Synthetic oligonucleotide
tgtatgggccgcgctaagtctgtatgccgagcggttcagtatggactggggaccaatctgcaagccggtcgcaactatgc

SEQ ID NO: 4533 - DNA, 80 bp, Artificial Sequence
  Description of Artificial Sequence: Synthetic oligonucleotide
tgtatgggccgcgctaagtctgtatgccgagcggttcagttcagccctcaatcccagttccaagccggtcgcaactatgc

SEQ ID NO: 4534 - DNA, 80 bp, Artificial Sequence
  Description of Artificial Sequence: Synthetic oligonucleotide
tgtatgggccgcgctaagtctgtatgccgagcggttcagtagggccttgaacttcttgggcaagccggtcgcaactatgc

SEQ ID NO: 4535 - DNA, 80 bp, Artificial Sequence
  Description of Artificial Sequence: Synthetic oligonucleotide
tgtatgggccgcgctaagtcagccggttcgtcaagtagcatggtcttggtccacataccacaagccggtcgcaactatgc

SEQ ID NO: 4536 - DNA, 80 bp, Artificial Sequence
  Description of Artificial Sequence: Synthetic oligonucleotide
tgtatgggccgcgctaagtcagccggttcgtcaagtagcaaggctatcagtcccacatgtcaagccggtcgcaactatgc

SEQ ID NO: 4537 - DNA, 80 bp, Artificial Sequence
  Description of Artificial Sequence: Synthetic oligonucleotide
tgtatgggccgcgctaagtcagccggttcgtcaagtagcagtgttgaagtctgagggtgccaagccggtcgcaactatgc

SEQ ID NO: 4538 - DNA, 80 bp, Artificial Sequence
  Description of Artificial Sequence: Synthetic oligonucleotide
tgtatgggccgcgctaagtcagccggttcgtcaagtagcaggaaagcaagacaaacgggtcaagccggtcgcaactatgc

SEQ ID NO: 4539 - DNA, 80 bp, Artificial Sequence
  Description of Artificial Sequence: Synthetic oligonucleotide
tgtatgggccgcgctaagtcagccggttcgtcaagtagcatcttagggctgagctgaagtcaagccggtcgcaactatgc

SEQ ID NO: 4540 - DNA, 80 bp, Artificial Sequence
  Description of Artificial Sequence: Synthetic oligonucleotide
tgtatgggccgcgctaagtcagccggttcgtcaagtagcatatgccccaggacccaaaatcaagccggtcgcaactatgc

SEQ ID NO: 4541 - DNA, 80 bp, Artificial Sequence
  Description of Artificial Sequence: Synthetic oligonucleotide
tgtatgggccgcgctaagtcagccggttcgtcaagtagcactgtactgggcagaggctatcaagccggtcgcaactatgc

SEQ ID NO: 4542 - DNA, 80 bp, Artificial Sequence
  Description of Artificial Sequence: Synthetic oligonucleotide
tgtatgggccgcgctaagtcagccggttcgtcaagtagcacagctcagggtggagtctcacaagccggtcgcaactatgc

SEQ ID NO: 4543 - DNA, 80 bp, Artificial Sequence
  Description of Artificial Sequence: Synthetic oligonucleotide
tgtatgggccgcgctaagtcagccggttcgtcaagtagcaggaattgaaacccacacccacaagccggtcgcaactatgc

SEQ ID NO: 4544 - DNA, 80 bp, Artificial Sequence
  Description of Artificial Sequence: Synthetic oligonucleotide
tgtatgggccgcgctaagtcagccggttcgtcaagtagcaatggagagggtaaaagggcacaagccggtcgcaactatgc

SEQ ID NO: 4545 - DNA, 80 bp, Artificial Sequence
  Description of Artificial Sequence: Synthetic oligonucleotide
tgtatgggccgcgctaagtcagccggttcgtcaagtagcatggaccgctgccgcatttcccaagccggtcgcaactatgc

SEQ ID NO: 4546 - DNA, 80 bp, Artificial Sequence
  Description of Artificial Sequence: Synthetic oligonucleotide
tgtatgggccgcgctaagtcagccggttcgtcaagtagcactcaaaggggtcgtgtttggcaagccggtcgcaactatgc

SEQ ID NO: 4547 - DNA, 80 bp, Artificial Sequence
  Description of Artificial Sequence: Synthetic oligonucleotide
tgtatgggccgcgctaagtcagccggttcgtcaagtagcagcttgaatcttgctgtcccacaagccggtcgcaactatgc

SEQ ID NO: 4548 - DNA, 80 bp, Artificial Sequence
  Description of Artificial Sequence: Synthetic oligonucleotide
tgtatgggccgcgctaagtcagccggttcgtcaagtagcatggcctactaacactggagccaagccggtcgcaactatgc

SEQ ID NO: 4549 - DNA, 80 bp, Artificial Sequence
  Description of Artificial Sequence: Synthetic oligonucleotide
tgtatgggccgcgctaagtcagccggttcgtcaagtagcacctggcccactgttacaactcaagccggtcgcaactatgc

SEQ ID NO: 4550 - DNA, 80 bp, Artificial Sequence
  Description of Artificial Sequence: Synthetic oligonucleotide
tgtatgggccgcgctaagtcagccggttcgtcaagtagcaagctgtggttcctgcttgtacaagccggtcgcaactatgc

SEQ ID NO: 4551 - DNA, 80 bp, Artificial Sequence
  Description of Artificial Sequence: Synthetic oligonucleotide
tgtatgggccgcgctaagtcagccggttcgtcaagtagcatggcatatgcagtacagcaccaagccggtcgcaactatgc

SEQ ID NO: 4552 - DNA, 80 bp, Artificial Sequence
  Description of Artificial Sequence: Synthetic oligonucleotide
tgtatgggccgcgctaagtcagccggttcgtcaagtagcatgtgtcagcccaccaaattgcaagccggtcgcaactatgc

SEQ ID NO: 4553 - DNA, 80 bp, Artificial Sequence
  Description of Artificial Sequence: Synthetic oligonucleotide
tgtatgggccgcgctaagtcagccggttcgtcaagtagcaagccgtcatatgtgagtcctcaagccggtcgcaactatgc

SEQ ID NO: 4554 - DNA, 80 bp, Artificial Sequence
  Description of Artificial Sequence: Synthetic oligonucleotide
tgtatgggccgcgctaagtcagccggttcgtcaagtagcaggccctgtataacccctgagcaagccggtcgcaactatgc

SEQ ID NO: 4555 - DNA, 80 bp, Artificial Sequence
  Description of Artificial Sequence: Synthetic oligonucleotide
tgtatgggccgcgctaagtcagccggttcgtcaagtagcaagttgaagacctcagccctccaagccggtcgcaactatgc

SEQ ID NO: 4556 - DNA, 80 bp, Artificial Sequence
  Description of Artificial Sequence: Synthetic oligonucleotide
tgtatgggccgcgctaagtcagccggttcgtcaagtagcaggcaaaacctcaaaccctctcaagccggtcgcaactatgc

SEQ ID NO: 4557 - DNA, 80 bp, Artificial Sequence
  Description of Artificial Sequence: Synthetic oligonucleotide
tgtatgggccgcgctaagtcagccggttcgtcaagtagcaacccagaggccagtaagtctcaagccggtcgcaactatgc

SEQ ID NO: 4558 - DNA, 80 bp, Artificial Sequence
  Description of Artificial Sequence: Synthetic oligonucleotide
tgtatgggccgcgctaagtcagccggttcgtcaagtagcaacccatctgagcgggctgtccaagccggtcgcaactatgc

SEQ ID NO: 4559 - DNA, 80 bp, Artificial Sequence
  Description of Artificial Sequence: Synthetic oligonucleotide
tgtatgggccgcgctaagtcagccggttcgtcaagtagcaccattccagtcagacttgcgcaagccggtcgcaactatgc

SEQ ID NO: 4560 - DNA, 80 bp, Artificial Sequence
  Description of Artificial Sequence: Synthetic oligonucleotide
tgtatgggccgcgctaagtcagccggttcgtcaagtagcaccagttcagcatccagagctcaagccggtcgcaactatgc

SEQ ID NO: 4561 - DNA, 80 bp, Artificial Sequence
  Description of Artificial Sequence: Synthetic oligonucleotide
tgtatgggccgcgctaagtcagccggttcgtcaagtagcatgtatcccaagtttgctggccaagccggtcgcaactatgc

SEQ ID NO: 4562 - DNA, 80 bp, Artificial Sequence
  Description of Artificial Sequence: Synthetic oligonucleotide
tgtatgggccgcgctaagtcagccggttcgtcaagtagcatgctatgcactctgggtactcaagccggtcgcaactatgc

SEQ ID NO: 4563 - DNA, 80 bp, Artificial Sequence
  Description of Artificial Sequence: Synthetic oligonucleotide
tgtatgggccgcgctaagtcagccggttcgtcaagtagcaacctagcttctagccccaaccaagccggtcgcaactatgc

SEQ ID NO: 4564 - DNA, 80 bp, Artificial Sequence
  Description of Artificial Sequence: Synthetic oligonucleotide
tgtatgggccgcgctaagtcagccggttcgtcaagtagcacacgcatttccctgcactcgcaagccggtcgcaactatgc

SEQ ID NO: 4565 - DNA, 80 bp, Artificial Sequence
  Description of Artificial Sequence: Synthetic oligonucleotide
tgtatgggccgcgctaagtcagccggttcgtcaagtagcaaccggccagtacagaacatgcaagccggtcgcaactatgc

SEQ ID NO: 4566 - DNA, 80 bp, Artificial Sequence
  Description of Artificial Sequence: Synthetic oligonucleotide
tgtatgggccgcgctaagtcagccggttcgtcaagtagcattacagccgtggtgtaagggcaagccggtcgcaactatgc

SEQ ID NO: 4567 - DNA, 80 bp, Artificial Sequence
  Description of Artificial Sequence: Synthetic oligonucleotide
tgtatgggccgcgctaagtcagccggttcgtcaagtagcatgccagcctctaccatgccccaagccggtcgcaactatgc

SEQ ID NO: 4568 - DNA, 80 bp, Artificial Sequence
  Description of Artificial Sequence: Synthetic oligonucleotide
tgtatgggccgcgctaagtcagccggttcgtcaagtagcaggaagcagcatcatgacctccaagccggtcgcaactatgc

SEQ ID NO: 4569 - DNA, 80 bp, Artificial Sequence
  Description of Artificial Sequence: Synthetic oligonucleotide
tgtatgggccgcgctaagtcagccggttcgtcaagtagcatggatgtggtgctcggttcgcaagccggtcgcaactatgc

SEQ ID NO: 4570 - DNA, 80 bp, Artificial Sequence
  Description of Artificial Sequence: Synthetic oligonucleotide
tgtatgggccgcgctaagtcagccggttcgtcaagtagcaacatcatggggttgtggtctcaagccggtcgcaactatgc

SEQ ID NO: 4571 - DNA, 80 bp, Artificial Sequence
  Description of Artificial Sequence: Synthetic oligonucleotide
tgtatgggccgcgctaagtcagccggttcgtcaagtagcacccagaggcaaggctttgttcaagccggtcgcaactatgc

SEQ ID NO: 4572 - DNA, 80 bp, Artificial Sequence
  Description of Artificial Sequence: Synthetic oligonucleotide
tgtatgggccgcgctaagtcagccggttcgtcaagtagcaactaccagcttgtgactcctcaagccggtcgcaactatgc

SEQ ID NO: 4573 - DNA, 80 bp, Artificial Sequence
  Description of Artificial Sequence: Synthetic oligonucleotide
tgtatgggccgcgctaagtcagccggttcgtcaagtagcagtccaggccctcactacttccaagccggtcgcaactatgc

SEQ ID NO: 4574 - DNA, 80 bp, Artificial Sequence
  Description of Artificial Sequence: Synthetic oligonucleotide
tgtatgggccgcgctaagtcagccggttcgtcaagtagcagcccaaatggttttccatgccaagccggtcgcaactatgc

SEQ ID NO: 4575 - DNA, 80 bp, Artificial Sequence
  Description of Artificial Sequence: Synthetic oligonucleotide
tgtatgggccgcgctaagtcagccggttcgtcaagtagcatagatcatcccaactgcccacaagccggtcgcaactatgc

SEQ ID NO: 4576 - DNA, 80 bp, Artificial Sequence
  Description of Artificial Sequence: Synthetic oligonucleotide
tgtatgggccgcgctaagtcagccggttcgtcaagtagcaaaaacgacagtagctgcacgcaagccggtcgcaactatgc

SEQ ID NO: 4577 - DNA, 80 bp, Artificial Sequence
  Description of Artificial Sequence: Synthetic oligonucleotide
tgtatgggccgcgctaagtcagccggttcgtcaagtagcactggctgtccttggctactacaagccggtcgcaactatgc

SEQ ID NO: 4578 - DNA, 80 bp, Artificial Sequence
  Description of Artificial Sequence: Synthetic oligonucleotide
tgtatgggccgcgctaagtcagccggttcgtcaagtagcattcccatgtgaacacagctgcaagccggtcgcaactatgc

SEQ ID NO: 4579 - DNA, 80 bp, Artificial Sequence
  Description of Artificial Sequence: Synthetic oligonucleotide
tgtatgggccgcgctaagtcagccggttcgtcaagtagcaaccgagtcttgacagaacctcaagccggtcgcaactatgc

SEQ ID NO: 4580 - DNA, 80 bp, Artificial Sequence
  Description of Artificial Sequence: Synthetic oligonucleotide
tgtatgggccgcgctaagtcagccggttcgtcaagtagcatgttgctccctctttgacgtcaagccggtcgcaactatgc

SEQ ID NO: 4581 - DNA, 80 bp, Artificial Sequence
  Description of Artificial Sequence: Synthetic oligonucleotide
tgtatgggccgcgctaagtcagccggttcgtcaagtagcaggcctcactacttgccagttcaagccggtcgcaactatgc

SEQ ID NO: 4582 - DNA, 80 bp, Artificial Sequence
  Description of Artificial Sequence: Synthetic oligonucleotide
tgtatgggccgcgctaagtcagccggttcgtcaagtagcaactaagctgtcctgggaaggcaagccggtcgcaactatgc

SEQ ID NO: 4583 - DNA, 80 bp, Artificial Sequence
  Description of Artificial Sequence: Synthetic oligonucleotide
tgtatgggccgcgctaagtcagccggttcgtcaagtagcaatggcctccaaacatctgcacaagccggtcgcaactatgc

SEQ ID NO: 4584 - DNA, 80 bp, Artificial Sequence
  Description of Artificial Sequence: Synthetic oligonucleotide
tgtatgggccgcgctaagtcagccggttcgtcaagtagcatggtttggtccatcctgtgtcaagccggtcgcaactatgc

SEQ ID NO: 4585 - DNA, 80 bp, Artificial Sequence
  Description of Artificial Sequence: Synthetic oligonucleotide
tgtatgggccgcgctaagtcagccggttcgtcaagtagcacgcgctcgctctacaggatgcaagccggtcgcaactatgc

SEQ ID NO: 4586 - DNA, 80 bp, Artificial Sequence
  Description of Artificial Sequence: Synthetic oligonucleotide
tgtatgggccgcgctaagtcagccggttcgtcaagtagcaagggagaccaaacaggatgccaagccggtcgcaactatgc

SEQ ID NO: 4587 - DNA, 80 bp, Artificial Sequence
  Description of Artificial Sequence: Synthetic oligonucleotide
tgtatgggccgcgctaagtcagccggttcgtcaagtagcacctgtgcccatgtacctgagcaagccggtcgcaactatgc

SEQ ID NO: 4588 - DNA, 80 bp, Artificial Sequence
  Description of Artificial Sequence: Synthetic oligonucleotide
tgtatgggccgcgctaagtcagccggttcgtcaagtagcatggatgctcacatgtagccccaagccggtcgcaactatgc

SEQ ID NO: 4589 - DNA, 80 bp, Artificial Sequence
  Description of Artificial Sequence: Synthetic oligonucleotide
tgtatgggccgcgctaagtcagccggttcgtcaagtagcaaaaccctcagctctgtcagccaagccggtcgcaactatgc

SEQ ID NO: 4590 - DNA, 80 bp, Artificial Sequence
  Description of Artificial Sequence: Synthetic oligonucleotide
tgtatgggccgcgctaagtcagccggttcgtcaagtagcaacattgttttgctggggcgtcaagccggtcgcaactatgc

SEQ ID NO: 4591 - DNA, 80 bp, Artificial Sequence
  Description of Artificial Sequence: Synthetic oligonucleotide
tgtatgggccgcgctaagtcagccggttcgtcaagtagcaatgagcgacttctcaagggccaagccggtcgcaactatgc

SEQ ID NO: 4592 - DNA, 80 bp, Artificial Sequence
  Description of Artificial Sequence: Synthetic oligonucleotide
tgtatgggccgcgctaagtcagccggttcgtcaagtagcatccctgctctgttcagtgtacaagccggtcgcaactatgc

SEQ ID NO: 4593 - DNA, 80 bp, Artificial Sequence
  Description of Artificial Sequence: Synthetic oligonucleotide
tgtatgggccgcgctaagtcagccggttcgtcaagtagcacccctcctaggccttctcttcaagccggtcgcaactatgc

SEQ ID NO: 4594 - DNA, 80 bp, Artificial Sequence
  Description of Artificial Sequence: Synthetic oligonucleotide
tgtatgggccgcgctaagtcagccggttcgtcaagtagcatccaagtgacattgcaccagcaagccggtcgcaactatgc

SEQ ID NO: 4595 - DNA, 80 bp, Artificial Sequence
  Description of Artificial Sequence: Synthetic oligonucleotide
tgtatgggccgcgctaagtcagccggttcgtcaagtagcatgccagtagggtgaatcagacaagccggtcgcaactatgc

SEQ ID NO: 4596 - DNA, 80 bp, Artificial Sequence
  Description of Artificial Sequence: Synthetic oligonucleotide
tgtatgggccgcgctaagtcagccggttcgtcaagtagcaaggcagggttccacaggctccaagccggtcgcaactatgc

SEQ ID NO: 4597 - DNA, 80 bp, Artificial Sequence
  Description of Artificial Sequence: Synthetic oligonucleotide
tgtatgggccgcgctaagtcagccggttcgtcaagtagcatcaacattcatgatggggcccaagccggtcgcaactatgc

SEQ ID NO: 4598 - DNA, 80 bp, Artificial Sequence
  Description of Artificial Sequence: Synthetic oligonucleotide
tgtatgggccgcgctaagtcagccggttcgtcaagtagcatccttggagacagcatgacgcaagccggtcgcaactatgc

SEQ ID NO: 4599 - DNA, 80 bp, Artificial Sequence
  Description of Artificial Sequence: Synthetic oligonucleotide
tgtatgggccgcgctaagtcagccggttcgtcaagtagcatttcgctttcttggcttccacaagccggtcgcaactatgc

SEQ ID NO: 4600 - DNA, 80 bp, Artificial Sequence
  Description of Artificial Sequence: Synthetic oligonucleotide
tgtatgggccgcgctaagtcagccggttcgtcaagtagcagcttggccaaactgtgctaacaagccggtcgcaactatgc

SEQ ID NO: 4601 - DNA, 80 bp, Artificial Sequence
  Description of Artificial Sequence: Synthetic oligonucleotide
tgtatgggccgcgctaagtcagccggttcgtcaagtagcactgcccggaaatgagcacgccaagccggtcgcaactatgc

SEQ ID NO: 4602 - DNA, 80 bp, Artificial Sequence
  Description of Artificial Sequence: Synthetic oligonucleotide
tgtatgggccgcgctaagtcagccggttcgtcaagtagcatttgtttccggtccatctgccaagccggtcgcaactatgc

SEQ ID NO: 4603 - DNA, 80 bp, Artificial Sequence
  Description of Artificial Sequence: Synthetic oligonucleotide
tgtatgggccgcgctaagtcagccggttcgtcaagtagcagtcctggcgcggtgggtacacaagccggtcgcaactatgc

SEQ ID NO: 4604 - DNA, 80 bp, Artificial Sequence
  Description of Artificial Sequence: Synthetic oligonucleotide
tgtatgggccgcgctaagtcagccggttcgtcaagtagcaacaacagtgcacctttgtcccaagccggtcgcaactatgc

SEQ ID NO: 4605 - DNA, 80 bp, Artificial Sequence
  Description of Artificial Sequence: Synthetic oligonucleotide
tgtatgggccgcgctaagtcagccggttcgtcaagtagcaaggccttgaaagggaaggaacaagccggtcgcaactatgc

SEQ ID NO: 4606 - DNA, 80 bp, Artificial Sequence
  Description of Artificial Sequence: Synthetic oligonucleotide
tgtatgggccgcgctaagtcagccggttcgtcaagtagcaccacagggcccaaagctcctcaagccggtcgcaactatgc

SEQ ID NO: 4607 - DNA, 80 bp, Artificial Sequence
  Description of Artificial Sequence: Synthetic oligonucleotide
tgtatgggccgcgctaagtcagccggttcgtcaagtagcacctcccttttagtcccggtccaagccggtcgcaactatgc

SEQ ID NO: 4608 - DNA, 80 bp, Artificial Sequence
  Description of Artificial Sequence: Synthetic oligonucleotide
tgtatgggccgcgctaagtcagccggttcgtcaagtagcaggtactgccttgaccctcagcaagccggtcgcaactatgc

SEQ ID NO: 4609 - DNA, 80 bp, Artificial Sequence
  Description of Artificial Sequence: Synthetic oligonucleotide
tgtatgggccgcgctaagtcagccggttcgtcaagtagcaaaactgactgaaggggtgggcaagccggtcgcaactatgc

SEQ ID NO: 4610 - DNA, 80 bp, Artificial Sequence
  Description of Artificial Sequence: Synthetic oligonucleotide
tgtatgggccgcgctaagtcagccggttcgtcaagtagcatgggtgccagcgttgtgaagcaagccggtcgcaactatgc

SEQ ID NO: 4611 - DNA, 80 bp, Artificial Sequence
  Description of Artificial Sequence: Synthetic oligonucleotide
tgtatgggccgcgctaagtcagccggttcgtcaagtagcagggttgcagttccccatagtcaagccggtcgcaactatgc

SEQ ID NO: 4612 - DNA, 80 bp, Artificial Sequence
  Description of Artificial Sequence: Synthetic oligonucleotide
tgtatgggccgcgctaagtcagccggttcgtcaagtagcaacaaactgcacagtaagggccaagccggtcgcaactatgc

SEQ ID NO: 4613 - DNA, 80 bp, Artificial Sequence
  Description of Artificial Sequence: Synthetic oligonucleotide
tgtatgggccgcgctaagtcagccggttcgtcaagtagcatcaatgctttagggaccccacaagccggtcgcaactatgc

SEQ ID NO: 4614 - DNA, 80 bp, Artificial Sequence
  Description of Artificial Sequence: Synthetic oligonucleotide
tgtatgggccgcgctaagtcagccggttcgtcaagtagcaaccagaaagcttgagccagtcaagccggtcgcaactatgc

SEQ ID NO: 4615 - DNA, 80 bp, Artificial Sequence
  Description of Artificial Sequence: Synthetic oligonucleotide
tgtatgggccgcgctaagtcagccggttcgtcaagtagcaagttcccaaagccctctagtcaagccggtcgcaactatgc

SEQ ID NO: 4616 - DNA, 80 bp, Artificial Sequence
  Description of Artificial Sequence: Synthetic oligonucleotide
tgtatgggccgcgctaagtcagccggttcgtcaagtagcaaggtccacatagctgaagggcaagccggtcgcaactatgc

SEQ ID NO: 4617 - DNA, 80 bp, Artificial Sequence
  Description of Artificial Sequence: Synthetic oligonucleotide
tgtatgggccgcgctaagtcagccggttcgtcaagtagcatctagggcctagcatcttcccaagccggtcgcaactatgc

SEQ ID NO: 4618 - DNA, 80 bp, Artificial Sequence
  Description of Artificial Sequence: Synthetic oligonucleotide
tgtatgggccgcgctaagtcagccggttcgtcaagtagcatgtcactagtgtcaacggcgcaagccggtcgcaactatgc

SEQ ID NO: 4619 - DNA, 80 bp, Artificial Sequence
  Description of Artificial Sequence: Synthetic oligonucleotide
tgtatgggccgcgctaagtcagccggttcgtcaagtagcaacctctgtgcagaagagagccaagccggtcgcaactatgc

SEQ ID NO: 4620 - DNA, 80 bp, Artificial Sequence
  Description of Artificial Sequence: Synthetic oligonucleotide
tgtatgggccgcgctaagtcagccggttcgtcaagtagcaatggctagtcggaaagtggacaagccggtcgcaactatgc

SEQ ID NO: 4621 - DNA, 80 bp, Artificial Sequence
  Description of Artificial Sequence: Synthetic oligonucleotide
tgtatgggccgcgctaagtcagccggttcgtcaagtagcatgggcagaagtaccatgtgccaagccggtcgcaactatgc

SEQ ID NO: 4622 - DNA, 80 bp, Artificial Sequence
  Description of Artificial Sequence: Synthetic oligonucleotide
tgtatgggccgcgctaagtcagccggttcgtcaagtagcaatccctcatgattccaggctcaagccggtcgcaactatgc

SEQ ID NO: 4623 - DNA, 80 bp, Artificial Sequence
  Description of Artificial Sequence: Synthetic oligonucleotide
tgtatgggccgcgctaagtcagccggttcgtcaagtagcacactgccggaggggtacagccaagccggtcgcaactatgc

SEQ ID NO: 4624 - DNA, 80 bp, Artificial Sequence
  Description of Artificial Sequence: Synthetic oligonucleotide
tgtatgggccgcgctaagtcagccggttcgtcaagtagcatggggcattctgttcttccacaagccggtcgcaactatgc

SEQ ID NO: 4625 - DNA, 80 bp, Artificial Sequence
  Description of Artificial Sequence: Synthetic oligonucleotide
tgtatgggccgcgctaagtcagccggttcgtcaagtagcaaaggaaggtgatcagcctgccaagccggtcgcaactatgc

SEQ ID NO: 4626 - DNA, 80 bp, Artificial Sequence
  Description of Artificial Sequence: Synthetic oligonucleotide
tgtatgggccgcgctaagtcagccggttcgtcaagtagcagtggggctaaaccacacatgcaagccggtcgcaactatgc

SEQ ID NO: 4627 - DNA, 80 bp, Artificial Sequence
  Description of Artificial Sequence: Synthetic oligonucleotide
tgtatgggccgcgctaagtcagccggttcgtcaagtagcatgaaaacgagctcaggccaacaagccggtcgcaactatgc

SEQ ID NO: 4628 - DNA, 80 bp, Artificial Sequence
  Description of Artificial Sequence: Synthetic oligonucleotide
tgtatgggccgcgctaagtcagccggttcgtcaagtagcaccagcaacagacaggtaagccaagccggtcgcaactatgc

SEQ ID NO: 4629 - DNA, 80 bp, Artificial Sequence
  Description of Artificial Sequence: Synthetic oligonucleotide
tgtatgggccgcgctaagtcagccggttcgtcaagtagcaatgggactgggaccattacccaagccggtcgcaactatgc

SEQ ID NO: 4630 - DNA, 80 bp, Artificial Sequence
  Description of Artificial Sequence: Synthetic oligonucleotide
tgtatgggccgcgctaagtcagccggttcgtcaagtagcatctatctggcgcagttgtgacaagccggtcgcaactatgc

SEQ ID NO: 4631 - DNA, 80 bp, Artificial Sequence
  Description of Artificial Sequence: Synthetic oligonucleotide
tgtatgggccgcgctaagtcagccggttcgtcaagtagcattaaggacgagcactggggacaagccggtcgcaactatgc

SEQ ID NO: 4632 - DNA, 80 bp, Artificial Sequence
  Description of Artificial Sequence: Synthetic oligonucleotide
tgtatgggccgcgctaagtcagccggttcgtcaagtagcaactccgcctcttcctcttgacaagccggtcgcaactatgc

SEQ ID NO: 4633 - DNA, 80 bp, Artificial Sequence
  Description of Artificial Sequence: Synthetic oligonucleotide
tgtatgggccgcgctaagtcagccggttcgtcaagtagcatcttgctccctacgacggtgcaagccggtcgcaactatgc

SEQ ID NO: 4634 - DNA, 80 bp, Artificial Sequence
  Description of Artificial Sequence: Synthetic oligonucleotide
tgtatgggccgcgctaagtcagccggttcgtcaagtagcaagaatctgaattcgccgtgccaagccggtcgcaactatgc

SEQ ID NO: 4635 - DNA, 80 bp, Artificial Sequence
  Description of Artificial Sequence: Synthetic oligonucleotide
tgtatgggccgcgctaagtcagccggttcgtcaagtagcactgcctcctattggggtcctcaagccggtcgcaactatgc

SEQ ID NO: 4636 - DNA, 80 bp, Artificial Sequence
  Description of Artificial Sequence: Synthetic oligonucleotide
tgtatgggccgcgctaagtcagccggttcgtcaagtagcatggaaaggtgactcagtggacaagccggtcgcaactatgc

SEQ ID NO: 4637 - DNA, 80 bp, Artificial Sequence
  Description of Artificial Sequence: Synthetic oligonucleotide
tgtatgggccgcgctaagtcagccggttcgtcaagtagcaaggggtcatggatttagccacaagccggtcgcaactatgc

SEQ ID NO: 4638 - DNA, 80 bp, Artificial Sequence
  Description of Artificial Sequence: Synthetic oligonucleotide
tgtatgggccgcgctaagtcagccggttcgtcaagtagcaggcttgttctggtgtgaagtcaagccggtcgcaactatgc

SEQ ID NO: 4639 - DNA, 80 bp, Artificial Sequence
  Description of Artificial Sequence: Synthetic oligonucleotide
tgtatgggccgcgctaagtcagccggttcgtcaagtagcaactttgttgggtgctgtgtgcaagccggtcgcaactatgc

SEQ ID NO: 4640 - DNA, 80 bp, Artificial Sequence
  Description of Artificial Sequence: Synthetic oligonucleotide
tgtatgggccgcgctaagtcagccggttcgtcaagtagcactcctgaggtctgggcaaaccaagccggtcgcaactatgc

SEQ ID NO: 4641 - DNA, 80 bp, Artificial Sequence
  Description of Artificial Sequence: Synthetic oligonucleotide
tgtatgggccgcgctaagtcagccggttcgtcaagtagcagagcactgtcactggtagcccaagccggtcgcaactatgc

SEQ ID NO: 4642 - DNA, 80 bp, Artificial Sequence
  Description of Artificial Sequence: Synthetic oligonucleotide
tgtatgggccgcgctaagtcagccggttcgtcaagtagcagaccggacagagacacgcaccaagccggtcgcaactatgc

SEQ ID NO: 4643 - DNA, 80 bp, Artificial Sequence
  Description of Artificial Sequence: Synthetic oligonucleotide
tgtatgggccgcgctaagtcagccggttcgtcaagtagcagctccactctgcgaaccctccaagccggtcgcaactatgc

SEQ ID NO: 4644 - DNA, 80 bp, Artificial Sequence
  Description of Artificial Sequence: Synthetic oligonucleotide
tgtatgggccgcgctaagtcagccggttcgtcaagtagcaactgagcagggccggttgagcaagccggtcgcaactatgc

SEQ ID NO: 4645 - DNA, 80 bp, Artificial Sequence
  Description of Artificial Sequence: Synthetic oligonucleotide
tgtatgggccgcgctaagtcagccggttcgtcaagtagcacaccagagggcgcatgaacccaagccggtcgcaactatgc

SEQ ID NO: 4646 - DNA, 80 bp, Artificial Sequence
  Description of Artificial Sequence: Synthetic oligonucleotide
tgtatgggccgcgctaagtcagccggttcgtcaagtagcatttctctacgtccacacccccaagccggtcgcaactatgc

SEQ ID NO: 4647 - DNA, 80 bp, Artificial Sequence
  Description of Artificial Sequence: Synthetic oligonucleotide
tgtatgggccgcgctaagtcagccggttcgtcaagtagcaggaggaggacccacagcttgcaagccggtcgcaactatgc

SEQ ID NO: 4648 - DNA, 80 bp, Artificial Sequence
  Description of Artificial Sequence: Synthetic oligonucleotide
tgtatgggccgcgctaagtcagccggttcgtcaagtagcaacccaggccctatcaacaagcaagccggtcgcaactatgc

SEQ ID NO: 4649 - DNA, 80 bp, Artificial Sequence
  Description of Artificial Sequence: Synthetic oligonucleotide
tgtatgggccgcgctaagtcagccggttcgtcaagtagcagtcagtgcatgcccaaccttcaagccggtcgcaactatgc

SEQ ID NO: 4650 - DNA, 80 bp, Artificial Sequence
  Description of Artificial Sequence: Synthetic oligonucleotide
tgtatgggccgcgctaagtcagccggttcgtcaagtagcacacatcagtagtgcagctggcaagccggtcgcaactatgc

SEQ ID NO: 4651 - DNA, 80 bp, Artificial Sequence
  Description of Artificial Sequence: Synthetic oligonucleotide
tgtatgggccgcgctaagtcagccggttcgtcaagtagcaagtcgcatggattgacttgccaagccggtcgcaactatgc

SEQ ID NO: 4652 - DNA, 80 bp, Artificial Sequence
  Description of Artificial Sequence: Synthetic oligonucleotide
tgtatgggccgcgctaagtcagccggttcgtcaagtagcaaagtcattgtggctgtgtcgcaagccggtcgcaactatgc

SEQ ID NO: 4653 - DNA, 80 bp, Artificial Sequence
  Description of Artificial Sequence: Synthetic oligonucleotide
tgtatgggccgcgctaagtcagccggttcgtcaagtagcacagtgccaccaacttgttgtcaagccggtcgcaactatgc

SEQ ID NO: 4654 - DNA, 80 bp, Artificial Sequence
  Description of Artificial Sequence: Synthetic oligonucleotide
tgtatgggccgcgctaagtcagccggttcgtcaagtagcacggggccggatctcactcctcaagccggtcgcaactatgc

SEQ ID NO: 4655 - DNA, 80 bp, Artificial Sequence
  Description of Artificial Sequence: Synthetic oligonucleotide
tgtatgggccgcgctaagtcagccggttcgtcaagtagcaagggctctgggctgggtccacaagccggtcgcaactatgc

SEQ ID NO: 4656 - DNA, 80 bp, Artificial Sequence
  Description of Artificial Sequence: Synthetic oligonucleotide
tgtatgggccgcgctaagtcagccggttcgtcaagtagcagctaggcaggcgggagaggacaagccggtcgcaactatgc

SEQ ID NO: 4657 - DNA, 80 bp, Artificial Sequence
  Description of Artificial Sequence: Synthetic oligonucleotide
tgtatgggccgcgctaagtcagccggttcgtcaagtagcacatcccagttgtggccaccccaagccggtcgcaactatgc

SEQ ID NO: 4658 - DNA, 80 bp, Artificial Sequence
  Description of Artificial Sequence: Synthetic oligonucleotide
tgtatgggccgcgctaagtcagccggttcgtcaagtagcaggtcgcactcactcgcttcccaagccggtcgcaactatgc

SEQ ID NO: 4659 - DNA, 80 bp, Artificial Sequence
  Description of Artificial Sequence: Synthetic oligonucleotide
tgtatgggccgcgctaagtcagccggttcgtcaagtagcaatccccaaagagacgaaggacaagccggtcgcaactatgc

SEQ ID NO: 4660 - DNA, 80 bp, Artificial Sequence
  Description of Artificial Sequence: Synthetic oligonucleotide
tgtatgggccgcgctaagtcagccggttcgtcaagtagcatctccctgcagcgcctgtggcaagccggtcgcaactatgc

SEQ ID NO: 4661 - DNA, 80 bp, Artificial Sequence
  Description of Artificial Sequence: Synthetic oligonucleotide
tgtatgggccgcgctaagtcagccggttcgtcaagtagcaaaagtagtgcaatggctggccaagccggtcgcaactatgc

SEQ ID NO: 4662 - DNA, 80 bp, Artificial Sequence
  Description of Artificial Sequence: Synthetic oligonucleotide
tgtatgggccgcgctaagtcagccggttcgtcaagtagcagcacaataaagtacgggccccaagccggtcgcaactatgc

SEQ ID NO: 4663 - DNA, 80 bp, Artificial Sequence
  Description of Artificial Sequence: Synthetic oligonucleotide
tgtatgggccgcgctaagtcagccggttcgtcaagtagcagcactcccaatgttccctgacaagccggtcgcaactatgc

SEQ ID NO: 4664 - DNA, 80 bp, Artificial Sequence
  Description of Artificial Sequence: Synthetic oligonucleotide
tgtatgggccgcgctaagtcagccggttcgtcaagtagcaagtctgctgaagtctgtggacaagccggtcgcaactatgc

SEQ ID NO: 4665 - DNA, 80 bp, Artificial Sequence
  Description of Artificial Sequence: Synthetic oligonucleotide
tgtatgggccgcgctaagtctgtatgccgagcggttcagtaatcaaggtgtctccgggtgcaagccggtcgcaactatgc

SEQ ID NO: 4666 - DNA, 80 bp, Artificial Sequence
  Description of Artificial Sequence: Synthetic oligonucleotide
tgtatgggccgcgctaagtctgtatgccgagcggttcagttggccgatgcaattgttagtcaagccggtcgcaactatgc

SEQ ID NO: 4667 - DNA, 80 bp, Artificial Sequence
  Description of Artificial Sequence: Synthetic oligonucleotide
tgtatgggccgcgctaagtctgtatgccgagcggttcagtacgtagacctcaaactcccacaagccggtcgcaactatgc

SEQ ID NO: 4668 - DNA, 80 bp, Artificial Sequence
  Description of Artificial Sequence: Synthetic oligonucleotide
tgtatgggccgcgctaagtctgtatgccgagcggttcagttacattcagagggctccacccaagccggtcgcaactatgc

SEQ ID NO: 4669 - DNA, 80 bp, Artificial Sequence
  Description of Artificial Sequence: Synthetic oligonucleotide
tgtatgggccgcgctaagtctgtatgccgagcggttcagtagcctctgaatgcactcgaccaagccggtcgcaactatgc

SEQ ID NO: 4670 - DNA, 80 bp, Artificial Sequence
  Description of Artificial Sequence: Synthetic oligonucleotide
tgtatgggccgcgctaagtctgtatgccgagcggttcagtaacgcattgagtctcccctccaagccggtcgcaactatgc

SEQ ID NO: 4671 - DNA, 80 bp, Artificial Sequence
  Description of Artificial Sequence: Synthetic oligonucleotide
tgtatgggccgcgctaagtctgtatgccgagcggttcagttgattggccatgttttcccacaagccggtcgcaactatgc

SEQ ID NO: 4672 - DNA, 80 bp, Artificial Sequence
  Description of Artificial Sequence: Synthetic oligonucleotide
tgtatgggccgcgctaagtctgtatgccgagcggttcagtacttgaaacccaccagaggccaagccggtcgcaactatgc

SEQ ID NO: 4673 - DNA, 80 bp, Artificial Sequence
  Description of Artificial Sequence: Synthetic oligonucleotide
tgtatgggccgcgctaagtctgtatgccgagcggttcagtctgtgagacaaggcagcaagcaagccggtcgcaactatgc

SEQ ID NO: 4674 - DNA, 80 bp, Artificial Sequence
  Description of Artificial Sequence: Synthetic oligonucleotide
tgtatgggccgcgctaagtctgtatgccgagcggttcagtagcaaacacctcaacatgcgcaagccggtcgcaactatgc

SEQ ID NO: 4675 - DNA, 80 bp, Artificial Sequence
  Description of Artificial Sequence: Synthetic oligonucleotide
tgtatgggccgcgctaagtctgtatgccgagcggttcagttaaaccccatgaagcaggcccaagccggtcgcaactatgc

SEQ ID NO: 4676 - DNA, 80 bp, Artificial Sequence
  Description of Artificial Sequence: Synthetic oligonucleotide
tgtatgggccgcgctaagtctgtatgccgagcggttcagtattagcacgacactcagggacaagccggtcgcaactatgc

SEQ ID NO: 4677 - DNA, 80 bp, Artificial Sequence
  Description of Artificial Sequence: Synthetic oligonucleotide
tgtatgggccgcgctaagtctgtatgccgagcggttcagtgtccccttcttgcatccttccaagccggtcgcaactatgc

SEQ ID NO: 4678 - DNA, 80 bp, Artificial Sequence
  Description of Artificial Sequence: Synthetic oligonucleotide
tgtatgggccgcgctaagtctgtatgccgagcggttcagttgaaacacggagcattgtgtcaagccggtcgcaactatgc

SEQ ID NO: 4679 - DNA, 80 bp, Artificial Sequence
  Description of Artificial Sequence: Synthetic oligonucleotide
tgtatgggccgcgctaagtctgtatgccgagcggttcagtcaggatgtaaccccacacctcaagccggtcgcaactatgc

SEQ ID NO: 4680 - DNA, 80 bp, Artificial Sequence
  Description of Artificial Sequence: Synthetic oligonucleotide
tgtatgggccgcgctaagtctgtatgccgagcggttcagtgtgtctctacccgctagcaacaagccggtcgcaactatgc

SEQ ID NO: 4681 - DNA, 80 bp, Artificial Sequence
  Description of Artificial Sequence: Synthetic oligonucleotide
tgtatgggccgcgctaagtctgtatgccgagcggttcagtaatatttggtggtgccgtcccaagccggtcgcaactatgc

SEQ ID NO: 4682 - DNA, 80 bp, Artificial Sequence
  Description of Artificial Sequence: Synthetic oligonucleotide
tgtatgggccgcgctaagtctgtatgccgagcggttcagtgcctggaagcccataacgctcaagccggtcgcaactatgc

SEQ ID NO: 4683 - DNA, 80 bp, Artificial Sequence
  Description of Artificial Sequence: Synthetic oligonucleotide
tgtatgggccgcgctaagtctgtatgccgagcggttcagttgcctgagtagcctaaggagcaagccggtcgcaactatgc

SEQ ID NO: 4684 - DNA, 80 bp, Artificial Sequence
  Description of Artificial Sequence: Synthetic oligonucleotide
tgtatgggccgcgctaagtctgtatgccgagcggttcagtttagaaacagtgaggcccggcaagccggtcgcaactatgc

SEQ ID NO: 4685 - DNA, 80 bp, Artificial Sequence
  Description of Artificial Sequence: Synthetic oligonucleotide
tgtatgggccgcgctaagtctgtatgccgagcggttcagtagcacccctcactagctgaccaagccggtcgcaactatgc

SEQ ID NO: 4686 - DNA, 80 bp, Artificial Sequence
  Description of Artificial Sequence: Synthetic oligonucleotide
tgtatgggccgcgctaagtctgtatgccgagcggttcagttcaatgccaacagcttgacacaagccggtcgcaactatgc

SEQ ID NO: 4687 - DNA, 80 bp, Artificial Sequence
  Description of Artificial Sequence: Synthetic oligonucleotide
tgtatgggccgcgctaagtctgtatgccgagcggttcagttctgtactgccacttcctgtcaagccggtcgcaactatgc

SEQ ID NO: 4688 - DNA, 80 bp, Artificial Sequence
  Description of Artificial Sequence: Synthetic oligonucleotide
tgtatgggccgcgctaagtctgtatgccgagcggttcagtaccacatccttcgacatcctcaagccggtcgcaactatgc

SEQ ID NO: 4689 - DNA, 80 bp, Artificial Sequence
  Description of Artificial Sequence: Synthetic oligonucleotide
tgtatgggccgcgctaagtctgtatgccgagcggttcagtttgccaatgagaagggtgcccaagccggtcgcaactatgc

SEQ ID NO: 4690 - DNA, 80 bp, Artificial Sequence
  Description of Artificial Sequence: Synthetic oligonucleotide
tgtatgggccgcgctaagtctgtatgccgagcggttcagttgttccaacagccaacagtgcaagccggtcgcaactatgc

SEQ ID NO: 4691 - DNA, 80 bp, Artificial Sequence
  Description of Artificial Sequence: Synthetic oligonucleotide
tgtatgggccgcgctaagtctgtatgccgagcggttcagtagggctggcagttttactctcaagccggtcgcaactatgc

SEQ ID NO: 4692 - DNA, 80 bp, Artificial Sequence
  Description of Artificial Sequence: Synthetic oligonucleotide
tgtatgggccgcgctaagtctgtatgccgagcggttcagtttgctctccactggatcccccaagccggtcgcaactatgc

SEQ ID NO: 4693 - DNA, 80 bp, Artificial Sequence
  Description of Artificial Sequence: Synthetic oligonucleotide
tgtatgggccgcgctaagtctgtatgccgagcggttcagtcctaacacggcatcagctggcaagccggtcgcaactatgc

SEQ ID NO: 4694 - DNA, 80 bp, Artificial Sequence
  Description of Artificial Sequence: Synthetic oligonucleotide
tgtatgggccgcgctaagtctgtatgccgagcggttcagtcaggtcccttctcctccttccaagccggtcgcaactatgc

SEQ ID NO: 4695 - DNA, 80 bp, Artificial Sequence
  Description of Artificial Sequence: Synthetic oligonucleotide
tgtatgggccgcgctaagtctgtatgccgagcggttcagtatagacttggtgggactccgcaagccggtcgcaactatgc

SEQ ID NO: 4696 - DNA, 80 bp, Artificial Sequence
  Description of Artificial Sequence: Synthetic oligonucleotide
tgtatgggccgcgctaagtctgtatgccgagcggttcagtatcttgtcatctggggtcgtcaagccggtcgcaactatgc

SEQ ID NO: 4697 - DNA, 80 bp, Artificial Sequence
  Description of Artificial Sequence: Synthetic oligonucleotide
tgtatgggccgcgctaagtctgtatgccgagcggttcagttccttccatacacgccagaacaagccggtcgcaactatgc

SEQ ID NO: 4698 - DNA, 80 bp, Artificial Sequence
  Description of Artificial Sequence: Synthetic oligonucleotide
tgtatgggccgcgctaagtctgtatgccgagcggttcagtttgctggattggcagaaagccaagccggtcgcaactatgc

SEQ ID NO: 4699 - DNA, 80 bp, Artificial Sequence
  Description of Artificial Sequence: Synthetic oligonucleotide
tgtatgggccgcgctaagtctgtatgccgagcggttcagtagctgtgtgtggataacggacaagccggtcgcaactatgc

SEQ ID NO: 4700 - DNA, 80 bp, Artificial Sequence
  Description of Artificial Sequence: Synthetic oligonucleotide
tgtatgggccgcgctaagtctgtatgccgagcggttcagttcatcctcttctcgcgcttgcaagccggtcgcaactatgc

SEQ ID NO: 4701 - DNA, 80 bp, Artificial Sequence
  Description of Artificial Sequence: Synthetic oligonucleotide
tgtatgggccgcgctaagtctgtatgccgagcggttcagtggtctaaggggccagcctcacaagccggtcgcaactatgc

SEQ ID NO: 4702 - DNA, 80 bp, Artificial Sequence
  Description of Artificial Sequence: Synthetic oligonucleotide
tgtatgggccgcgctaagtctgtatgccgagcggttcagtacccgggaattctgagatgacaagccggtcgcaactatgc

SEQ ID NO: 4703 - DNA, 80 bp, Artificial Sequence
  Description of Artificial Sequence: Synthetic oligonucleotide
tgtatgggccgcgctaagtctgtatgccgagcggttcagttcaaggcatctcaaggaggtcaagccggtcgcaactatgc

SEQ ID NO: 4704 - DNA, 80 bp, Artificial Sequence
  Description of Artificial Sequence: Synthetic oligonucleotide
tgtatgggccgcgctaagtctgtatgccgagcggttcagtgtgcacattctggggctacacaagccggtcgcaactatgc

SEQ ID NO: 4705 - DNA, 80 bp, Artificial Sequence
  Description of Artificial Sequence: Synthetic oligonucleotide
tgtatgggccgcgctaagtctgtatgccgagcggttcagtcccaaggggcacattgatcacaagccggtcgcaactatgc

SEQ ID NO: 4706 - DNA, 80 bp, Artificial Sequence
  Description of Artificial Sequence: Synthetic oligonucleotide
tgtatgggccgcgctaagtctgtatgccgagcggttcagtaagtacgtgaacccagagcacaagccggtcgcaactatgc

SEQ ID NO: 4707 - DNA, 80 bp, Artificial Sequence
  Description of Artificial Sequence: Synthetic oligonucleotide
tgtatgggccgcgctaagtctgtatgccgagcggttcagtgcaaaccctagcagcagtcacaagccggtcgcaactatgc

SEQ ID NO: 4708 - DNA, 80 bp, Artificial Sequence
  Description of Artificial Sequence: Synthetic oligonucleotide
tgtatgggccgcgctaagtctgtatgccgagcggttcagtggtggagaatcccatcaagccaagccggtcgcaactatgc

SEQ ID NO: 4709 - DNA, 80 bp, Artificial Sequence
  Description of Artificial Sequence: Synthetic oligonucleotide
tgtatgggccgcgctaagtctgtatgccgagcggttcagtcacgcggccaagaaagattacaagccggtcgcaactatgc

SEQ ID NO: 4710 - DNA, 80 bp, Artificial Sequence
  Description of Artificial Sequence: Synthetic oligonucleotide
tgtatgggccgcgctaagtctgtatgccgagcggttcagtaagcgtaaggcagagttccacaagccggtcgcaactatgc

SEQ ID NO: 4711 - DNA, 80 bp, Artificial Sequence
  Description of Artificial Sequence: Synthetic oligonucleotide
tgtatgggccgcgctaagtctgtatgccgagcggttcagtccatcttcttcccgcctacacaagccggtcgcaactatgc

SEQ ID NO: 4712 - DNA, 80 bp, Artificial Sequence
  Description of Artificial Sequence: Synthetic oligonucleotide
tgtatgggccgcgctaagtctgtatgccgagcggttcagtttacaagggtccgtaaggcccaagccggtcgcaactatgc

SEQ ID NO: 4713 - DNA, 80 bp, Artificial Sequence
  Description of Artificial Sequence: Synthetic oligonucleotide
tgtatgggccgcgctaagtctgtatgccgagcggttcagttccaagggctcttagctagccaagccggtcgcaactatgc

SEQ ID NO: 4714 - DNA, 80 bp, Artificial Sequence
  Description of Artificial Sequence: Synthetic oligonucleotide
tgtatgggccgcgctaagtctgtatgccgagcggttcagtatgttggcaaatcgtgacggcaagccggtcgcaactatgc

SEQ ID NO: 4715 - DNA, 80 bp, Artificial Sequence
  Description of Artificial Sequence: Synthetic oligonucleotide
tgtatgggccgcgctaagtctgtatgccgagcggttcagtaatggtggcaaacagtgaggcaagccggtcgcaactatgc

SEQ ID NO: 4716 - DNA, 80 bp, Artificial Sequence
  Description of Artificial Sequence: Synthetic oligonucleotide
tgtatgggccgcgctaagtctgtatgccgagcggttcagtgtgaggcacactggttttgacaagccggtcgcaactatgc

SEQ ID NO: 4717 - DNA, 80 bp, Artificial Sequence
  Description of Artificial Sequence: Synthetic oligonucleotide
tgtatgggccgcgctaagtctgtatgccgagcggttcagtccacatggacggctttctgccaagccggtcgcaactatgc

SEQ ID NO: 4718 - DNA, 80 bp, Artificial Sequence
  Description of Artificial Sequence: Synthetic oligonucleotide
tgtatgggccgcgctaagtctgtatgccgagcggttcagtcctcgttcagctcagcaaaccaagccggtcgcaactatgc

SEQ ID NO: 4719 - DNA, 80 bp, Artificial Sequence
  Description of Artificial Sequence: Synthetic oligonucleotide
tgtatgggccgcgctaagtctgtatgccgagcggttcagtctacgcaatccccgcctttgcaagccggtcgcaactatgc

SEQ ID NO: 4720 - DNA, 80 bp, Artificial Sequence
  Description of Artificial Sequence: Synthetic oligonucleotide
tgtatgggccgcgctaagtctgtatgccgagcggttcagtaccagccactgtgcaattttcaagccggtcgcaactatgc

SEQ ID NO: 4721 - DNA, 80 bp, Artificial Sequence
  Description of Artificial Sequence: Synthetic oligonucleotide
tgtatgggccgcgctaagtctgtatgccgagcggttcagtcagagaactggccaacgagccaagccggtcgcaactatgc

SEQ ID NO: 4722 - DNA, 80 bp, Artificial Sequence
  Description of Artificial Sequence: Synthetic oligonucleotide
tgtatgggccgcgctaagtctgtatgccgagcggttcagtttccaaatgaggcaagctggcaagccggtcgcaactatgc

SEQ ID NO: 4723 - DNA, 80 bp, Artificial Sequence
  Description of Artificial Sequence: Synthetic oligonucleotide
tgtatgggccgcgctaagtctgtatgccgagcggttcagtcatcctctcatcatggcggccaagccggtcgcaactatgc

SEQ ID NO: 4724 - DNA, 80 bp, Artificial Sequence
  Description of Artificial Sequence: Synthetic oligonucleotide
tgtatgggccgcgctaagtctgtatgccgagcggttcagttgaagccagtcagcgcgtttcaagccggtcgcaactatgc

SEQ ID NO: 4725 - DNA, 80 bp, Artificial Sequence
  Description of Artificial Sequence: Synthetic oligonucleotide
tgtatgggccgcgctaagtctgtatgccgagcggttcagtgcccaagagacggccaaacccaagccggtcgcaactatgc

SEQ ID NO: 4726 - DNA, 80 bp, Artificial Sequence
  Description of Artificial Sequence: Synthetic oligonucleotide
tgtatgggccgcgctaagtctgtatgccgagcggttcagtcgcctaagcaaagatcaccgcaagccggtcgcaactatgc

SEQ ID NO: 4727 - DNA, 80 bp, Artificial Sequence
  Description of Artificial Sequence: Synthetic oligonucleotide
tgtatgggccgcgctaagtctgtatgccgagcggttcagttaagcaaaggcattcccagccaagccggtcgcaactatgc

SEQ ID NO: 4728 - DNA, 80 bp, Artificial Sequence
  Description of Artificial Sequence: Synthetic oligonucleotide
tgtatgggccgcgctaagtctgtatgccgagcggttcagtgggagagggttgcggtggcacaagccggtcgcaactatgc

SEQ ID NO: 4729 - DNA, 80 bp, Artificial Sequence
  Description of Artificial Sequence: Synthetic oligonucleotide
tgtatgggccgcgctaagtctgtatgccgagcggttcagtgcacttccaagggagagcaacaagccggtcgcaactatgc

SEQ ID NO: 4730 - DNA, 80 bp, Artificial Sequence
  Description of Artificial Sequence: Synthetic oligonucleotide
tgtatgggccgcgctaagtctgtatgccgagcggttcagtccttcctaccctggagtgttcaagccggtcgcaactatgc

SEQ ID NO: 4731 - DNA, 80 bp, Artificial Sequence
  Description of Artificial Sequence: Synthetic oligonucleotide
tgtatgggccgcgctaagtctgtatgccgagcggttcagtaaacaaccatgtggccttcacaagccggtcgcaactatgc

SEQ ID NO: 4732 - DNA, 80 bp, Artificial Sequence
  Description of Artificial Sequence: Synthetic oligonucleotide
tgtatgggccgcgctaagtctgtatgccgagcggttcagtgggaacccctgacatcaccacaagccggtcgcaactatgc

SEQ ID NO: 4733 - DNA, 80 bp, Artificial Sequence
  Description of Artificial Sequence: Synthetic oligonucleotide
tgtatgggccgcgctaagtctgtatgccgagcggttcagtcagaaccccagaatcgccatcaagccggtcgcaactatgc

SEQ ID NO: 4734 - DNA, 80 bp, Artificial Sequence
  Description of Artificial Sequence: Synthetic oligonucleotide
tgtatgggccgcgctaagtctgtatgccgagcggttcagtgcccctgtccaagctacatacaagccggtcgcaactatgc

SEQ ID NO: 4735 - DNA, 80 bp, Artificial Sequence
  Description of Artificial Sequence: Synthetic oligonucleotide
tgtatgggccgcgctaagtctgtatgccgagcggttcagtcacttcaagtggggatgggccaagccggtcgcaactatgc

SEQ ID NO: 4736 - DNA, 80 bp, Artificial Sequence
  Description of Artificial Sequence: Synthetic oligonucleotide
tgtatgggccgcgctaagtctgtatgccgagcggttcagtaaagcagcttaggcattggccaagccggtcgcaactatgc

SEQ ID NO: 4737 - DNA, 80 bp, Artificial Sequence
  Description of Artificial Sequence: Synthetic oligonucleotide
tgtatgggccgcgctaagtctgtatgccgagcggttcagtcctcctccttgccctgcaaacaagccggtcgcaactatgc

SEQ ID NO: 4738 - DNA, 80 bp, Artificial Sequence
  Description of Artificial Sequence: Synthetic oligonucleotide
tgtatgggccgcgctaagtctgtatgccgagcggttcagtccactgaactggctaaggcacaagccggtcgcaactatgc

SEQ ID NO: 4739 - DNA, 80 bp, Artificial Sequence
  Description of Artificial Sequence: Synthetic oligonucleotide
tgtatgggccgcgctaagtctgtatgccgagcggttcagtactgcctctcctggtattgtcaagccggtcgcaactatgc

SEQ ID NO: 4740 - DNA, 80 bp, Artificial Sequence
  Description of Artificial Sequence: Synthetic oligonucleotide
tgtatgggccgcgctaagtctgtatgccgagcggttcagtactcacgtgagggcagcatacaagccggtcgcaactatgc

SEQ ID NO: 4741 - DNA, 80 bp, Artificial Sequence
  Description of Artificial Sequence: Synthetic oligonucleotide
tgtatgggccgcgctaagtctgtatgccgagcggttcagtcctcacctgccgttagacatcaagccggtcgcaactatgc

SEQ ID NO: 4742 - DNA, 80 bp, Artificial Sequence
  Description of Artificial Sequence: Synthetic oligonucleotide
tgtatgggccgcgctaagtctgtatgccgagcggttcagtgcaggcaccagtgatgttgacaagccggtcgcaactatgc

SEQ ID NO: 4743 - DNA, 80 bp, Artificial Sequence
  Description of Artificial Sequence: Synthetic oligonucleotide
tgtatgggccgcgctaagtctgtatgccgagcggttcagtacgtgctagacaactcctcacaagccggtcgcaactatgc

SEQ ID NO: 4744 - DNA, 80 bp, Artificial Sequence
  Description of Artificial Sequence: Synthetic oligonucleotide
tgtatgggccgcgctaagtctgtatgccgagcggttcagttcgggcttctggctgcactgcaagccggtcgcaactatgc

SEQ ID NO: 4745 - DNA, 80 bp, Artificial Sequence
  Description of Artificial Sequence: Synthetic oligonucleotide
tgtatgggccgcgctaagtctgtatgccgagcggttcagttcccatctctcagtcttgcccaagccggtcgcaactatgc

SEQ ID NO: 4746 - DNA, 80 bp, Artificial Sequence
  Description of Artificial Sequence: Synthetic oligonucleotide
tgtatgggccgcgctaagtctgtatgccgagcggttcagttggcccatcctctatgaactcaagccggtcgcaactatgc

SEQ ID NO: 4747 - DNA, 80 bp, Artificial Sequence
  Description of Artificial Sequence: Synthetic oligonucleotide
tgtatgggccgcgctaagtctgtatgccgagcggttcagtaggcacgtttggtgtagtcgcaagccggtcgcaactatgc

SEQ ID NO: 4748 - DNA, 80 bp, Artificial Sequence
  Description of Artificial Sequence: Synthetic oligonucleotide
tgtatgggccgcgctaagtctgtatgccgagcggttcagtgccagtgggtgtctgtctagcaagccggtcgcaactatgc

SEQ ID NO: 4749 - DNA, 80 bp, Artificial Sequence
  Description of Artificial Sequence: Synthetic oligonucleotide
tgtatgggccgcgctaagtctgtatgccgagcggttcagtccaaaagctcacgagtaggccaagccggtcgcaactatgc

SEQ ID NO: 4750 - DNA, 80 bp, Artificial Sequence
  Description of Artificial Sequence: Synthetic oligonucleotide
tgtatgggccgcgctaagtctgtatgccgagcggttcagtcctgggccttgagagtttggcaagccggtcgcaactatgc

SEQ ID NO: 4751 - DNA, 80 bp, Artificial Sequence
  Description of Artificial Sequence: Synthetic oligonucleotide
tgtatgggccgcgctaagtctgtatgccgagcggttcagtgcccagagacctccacgtgccaagccggtcgcaactatgc

SEQ ID NO: 4752 - DNA, 80 bp, Artificial Sequence
  Description of Artificial Sequence: Synthetic oligonucleotide
tgtatgggccgcgctaagtctgtatgccgagcggttcagtgagccagatgaaccgattcccaagccggtcgcaactatgc

SEQ ID NO: 4753 - DNA, 80 bp, Artificial Sequence
  Description of Artificial Sequence: Synthetic oligonucleotide
tgtatgggccgcgctaagtctgtatgccgagcggttcagtggccgagtttgccaaatgaacaagccggtcgcaactatgc

SEQ ID NO: 4754 - DNA, 80 bp, Artificial Sequence
  Description of Artificial Sequence: Synthetic oligonucleotide
tgtatgggccgcgctaagtctgtatgccgagcggttcagtctgcttcgaaacgccccagccaagccggtcgcaactatgc

SEQ ID NO: 4755 - DNA, 80 bp, Artificial Sequence
  Description of Artificial Sequence: Synthetic oligonucleotide
tgtatgggccgcgctaagtctgtatgccgagcggttcagtcatcgggagacctatgtccccaagccggtcgcaactatgc

SEQ ID NO: 4756 - DNA, 80 bp, Artificial Sequence
  Description of Artificial Sequence: Synthetic oligonucleotide
tgtatgggccgcgctaagtcagccggttcgtcaagtagcaacagtgaaaccttcctccctcaagccggtcgcaactatgc

SEQ ID NO: 4757 - DNA, 80 bp, Artificial Sequence
  Description of Artificial Sequence: Synthetic oligonucleotide
tgtatgggccgcgctaagtcagccggttcgtcaagtagcacaccttgctagagcctggcacaagccggtcgcaactatgc

SEQ ID NO: 4758 - DNA, 80 bp, Artificial Sequence
  Description of Artificial Sequence: Synthetic oligonucleotide
tgtatgggccgcgctaagtcagccggttcgtcaagtagcagtctccccatctagcgttctcaagccggtcgcaactatgc

SEQ ID NO: 4759 - DNA, 80 bp, Artificial Sequence
  Description of Artificial Sequence: Synthetic oligonucleotide
tgtatgggccgcgctaagtcagccggttcgtcaagtagcaatactcatggtggaggagggcaagccggtcgcaactatgc

SEQ ID NO: 4760 - DNA, 80 bp, Artificial Sequence
  Description of Artificial Sequence: Synthetic oligonucleotide
tgtatgggccgcgctaagtcagccggttcgtcaagtagcattgaaacttgcccagaagcccaagccggtcgcaactatgc

SEQ ID NO: 4761 - DNA, 80 bp, Artificial Sequence
  Description of Artificial Sequence: Synthetic oligonucleotide
tgtatgggccgcgctaagtcagccggttcgtcaagtagcagccactgccaccaggagtgacaagccggtcgcaactatgc

SEQ ID NO: 4762 - DNA, 80 bp, Artificial Sequence
  Description of Artificial Sequence: Synthetic oligonucleotide
tgtatgggccgcgctaagtcagccggttcgtcaagtagcatggcagtgacaccaataggccaagccggtcgcaactatgc

SEQ ID NO: 4763 - DNA, 80 bp, Artificial Sequence
  Description of Artificial Sequence: Synthetic oligonucleotide
tgtatgggccgcgctaagtcagccggttcgtcaagtagcagacagtattcacccgttcgccaagccggtcgcaactatgc

SEQ ID NO: 4764 - DNA, 80 bp, Artificial Sequence
  Description of Artificial Sequence: Synthetic oligonucleotide
tgtatgggccgcgctaagtcagccggttcgtcaagtagcaaaatgcggtccttgaatgctcaagccggtcgcaactatgc

SEQ ID NO: 4765 - DNA, 80 bp, Artificial Sequence
  Description of Artificial Sequence: Synthetic oligonucleotide
tgtatgggccgcgctaagtcagccggttcgtcaagtagcaaaatgccaatctgtgacccccaagccggtcgcaactatgc

SEQ ID NO: 4766 - DNA, 80 bp, Artificial Sequence
  Description of Artificial Sequence: Synthetic oligonucleotide
tgtatgggccgcgctaagtcagccggttcgtcaagtagcagcccactcagcctcatgttacaagccggtcgcaactatgc

SEQ ID NO: 4767 - DNA, 80 bp, Artificial Sequence
  Description of Artificial Sequence: Synthetic oligonucleotide
tgtatgggccgcgctaagtcagccggttcgtcaagtagcaacctagcacaaatgaggggacaagccggtcgcaactatgc

SEQ ID NO: 4768 - DNA, 80 bp, Artificial Sequence
  Description of Artificial Sequence: Synthetic oligonucleotide
tgtatgggccgcgctaagtcagccggttcgtcaagtagcacttccagccccatgtcaacccaagccggtcgcaactatgc

SEQ ID NO: 4769 - DNA, 80 bp, Artificial Sequence
  Description of Artificial Sequence: Synthetic oligonucleotide
tgtatgggccgcgctaagtcagccggttcgtcaagtagcagagcggagacctcccaacaacaagccggtcgcaactatgc

SEQ ID NO: 4770 - DNA, 80 bp, Artificial Sequence
  Description of Artificial Sequence: Synthetic oligonucleotide
tgtatgggccgcgctaagtcagccggttcgtcaagtagcacactgagtgcagcgattgggcaagccggtcgcaactatgc

SEQ ID NO: 4771 - DNA, 80 bp, Artificial Sequence
  Description of Artificial Sequence: Synthetic oligonucleotide
tgtatgggccgcgctaagtcagccggttcgtcaagtagcaccctgccctaaccagcctttcaagccggtcgcaactatgc

SEQ ID NO: 4772 - DNA, 80 bp, Artificial Sequence
  Description of Artificial Sequence: Synthetic oligonucleotide
tgtatgggccgcgctaagtcagccggttcgtcaagtagcaccagtgacaacatgggtgctcaagccggtcgcaactatgc

SEQ ID NO: 4773 - DNA, 80 bp, Artificial Sequence
  Description of Artificial Sequence: Synthetic oligonucleotide
tgtatgggccgcgctaagtcagccggttcgtcaagtagcacttcccaagttggttcctgccaagccggtcgcaactatgc

SEQ ID NO: 4774 - DNA, 80 bp, Artificial Sequence
  Description of Artificial Sequence: Synthetic oligonucleotide
tgtatgggccgcgctaagtcagccggttcgtcaagtagcacagcccctagttgttaagcccaagccggtcgcaactatgc

SEQ ID NO: 4775 - DNA, 80 bp, Artificial Sequence
  Description of Artificial Sequence: Synthetic oligonucleotide
tgtatgggccgcgctaagtcagccggttcgtcaagtagcacctgcctagtgtctccatcccaagccggtcgcaactatgc

SEQ ID NO: 4776 - DNA, 80 bp, Artificial Sequence
  Description of Artificial Sequence: Synthetic oligonucleotide
tgtatgggccgcgctaagtcagccggttcgtcaagtagcatctgcagaacctaggacctgcaagccggtcgcaactatgc

SEQ ID NO: 4777 - DNA, 80 bp, Artificial Sequence
  Description of Artificial Sequence: Synthetic oligonucleotide
tgtatgggccgcgctaagtcagccggttcgtcaagtagcaattttcagacaggtggtggccaagccggtcgcaactatgc

SEQ ID NO: 4778 - DNA, 80 bp, Artificial Sequence
  Description of Artificial Sequence: Synthetic oligonucleotide
tgtatgggccgcgctaagtcagccggttcgtcaagtagcagcccgcagctcaaaagactgcaagccggtcgcaactatgc

SEQ ID NO: 4779 - DNA, 80 bp, Artificial Sequence
  Description of Artificial Sequence: Synthetic oligonucleotide
tgtatgggccgcgctaagtcagccggttcgtcaagtagcaacacgagtcacagcccgaaccaagccggtcgcaactatgc

SEQ ID NO: 4780 - DNA, 80 bp, Artificial Sequence
  Description of Artificial Sequence: Synthetic oligonucleotide
tgtatgggccgcgctaagtcagccggttcgtcaagtagcagagtcctctccactaagccacaagccggtcgcaactatgc

SEQ ID NO: 4781 - DNA, 80 bp, Artificial Sequence
  Description of Artificial Sequence: Synthetic oligonucleotide
tgtatgggccgcgctaagtcagccggttcgtcaagtagcaagattccccagaccagctcacaagccggtcgcaactatgc

SEQ ID NO: 4782 - DNA, 80 bp, Artificial Sequence
  Description of Artificial Sequence: Synthetic oligonucleotide
tgtatgggccgcgctaagtcagccggttcgtcaagtagcatgggccgaggattctttgtccaagccggtcgcaactatgc

SEQ ID NO: 4783 - DNA, 80 bp, Artificial Sequence
  Description of Artificial Sequence: Synthetic oligonucleotide
tgtatgggccgcgctaagtcagccggttcgtcaagtagcagcctttgagtagggctgtgacaagccggtcgcaactatgc

SEQ ID NO: 4784 - DNA, 80 bp, Artificial Sequence
  Description of Artificial Sequence: Synthetic oligonucleotide
tgtatgggccgcgctaagtcagccggttcgtcaagtagcagatgtcacggaccttggacacaagccggtcgcaactatgc

SEQ ID NO: 4785 - DNA, 80 bp, Artificial Sequence
  Description of Artificial Sequence: Synthetic oligonucleotide
tgtatgggccgcgctaagtcagccggttcgtcaagtagcaaccgagtttgcaatggttcccaagccggtcgcaactatgc

SEQ ID NO: 4786 - DNA, 80 bp, Artificial Sequence
  Description of Artificial Sequence: Synthetic oligonucleotide
tgtatgggccgcgctaagtcagccggttcgtcaagtagcacaacacagtgatagagcggccaagccggtcgcaactatgc

SEQ ID NO: 4787 - DNA, 80 bp, Artificial Sequence
  Description of Artificial Sequence: Synthetic oligonucleotide
tgtatgggccgcgctaagtcagccggttcgtcaagtagcagcctccacagccaattttctcaagccggtcgcaactatgc

SEQ ID NO: 4788 - DNA, 80 bp, Artificial Sequence
  Description of Artificial Sequence: Synthetic oligonucleotide
tgtatgggccgcgctaagtcagccggttcgtcaagtagcacacccagctaggagtaggttcaagccggtcgcaactatgc

SEQ ID NO: 4789 - DNA, 80 bp, Artificial Sequence
  Description of Artificial Sequence: Synthetic oligonucleotide
tgtatgggccgcgctaagtcagccggttcgtcaagtagcaaacaaggggagatggtcacccaagccggtcgcaactatgc

SEQ ID NO: 4790 - DNA, 80 bp, Artificial Sequence
  Description of Artificial Sequence: Synthetic oligonucleotide
tgtatgggccgcgctaagtcagccggttcgtcaagtagcataagagaggagagaggccggcaagccggtcgcaactatgc

SEQ ID NO: 4791 - DNA, 80 bp, Artificial Sequence
  Description of Artificial Sequence: Synthetic oligonucleotide
tgtatgggccgcgctaagtcagccggttcgtcaagtagcaatggaaaacgaattgccccacaagccggtcgcaactatgc

SEQ ID NO: 4792 - DNA, 80 bp, Artificial Sequence
  Description of Artificial Sequence: Synthetic oligonucleotide
tgtatgggccgcgctaagtcagccggttcgtcaagtagcaggacttgtgacgcaaagaggcaagccggtcgcaactatgc

SEQ ID NO: 4793 - DNA, 80 bp, Artificial Sequence
  Description of Artificial Sequence: Synthetic oligonucleotide
tgtatgggccgcgctaagtcagccggttcgtcaagtagcaaggtgcctatctcgctaggacaagccggtcgcaactatgc

SEQ ID NO: 4794 - DNA, 80 bp, Artificial Sequence
  Description of Artificial Sequence: Synthetic oligonucleotide
tgtatgggccgcgctaagtcagccggttcgtcaagtagcaaccccatagcatccagatgacaagccggtcgcaactatgc

SEQ ID NO: 4795 - DNA, 80 bp, Artificial Sequence
  Description of Artificial Sequence: Synthetic oligonucleotide
tgtatgggccgcgctaagtcagccggttcgtcaagtagcacttggggctgctctaggtaacaagccggtcgcaactatgc

SEQ ID NO: 4796 - DNA, 80 bp, Artificial Sequence
  Description of Artificial Sequence: Synthetic oligonucleotide
tgtatgggccgcgctaagtcagccggttcgtcaagtagcaactgggatagggtgagttggcaagccggtcgcaactatgc

SEQ ID NO: 4797 - DNA, 80 bp, Artificial Sequence
  Description of Artificial Sequence: Synthetic oligonucleotide
tgtatgggccgcgctaagtcagccggttcgtcaagtagcatgggatttgggcctggagttcaagccggtcgcaactatgc

SEQ ID NO: 4798 - DNA, 80 bp, Artificial Sequence
  Description of Artificial Sequence: Synthetic oligonucleotide
tgtatgggccgcgctaagtcagccggttcgtcaagtagcaaaggagctcagaagatgggtcaagccggtcgcaactatgc

SEQ ID NO: 4799 - DNA, 80 bp, Artificial Sequence
  Description of Artificial Sequence: Synthetic oligonucleotide
tgtatgggccgcgctaagtcagccggttcgtcaagtagcaatgagctatgcagtcaggcacaagccggtcgcaactatgc

SEQ ID NO: 4800 - DNA, 80 bp, Artificial Sequence
  Description of Artificial Sequence: Synthetic oligonucleotide
tgtatgggccgcgctaagtcagccggttcgtcaagtagcatcacttccaccaatctccctcaagccggtcgcaactatgc

SEQ ID NO: 4801 - DNA, 80 bp, Artificial Sequence
  Description of Artificial Sequence: Synthetic oligonucleotide
tgtatgggccgcgctaagtcagccggttcgtcaagtagcaaacatgattgcatggccactcaagccggtcgcaactatgc

SEQ ID NO: 4802 - DNA, 80 bp, Artificial Sequence
  Description of Artificial Sequence: Synthetic oligonucleotide
tgtatgggccgcgctaagtcagccggttcgtcaagtagcagacctttgctctgtgggcttcaagccggtcgcaactatgc

SEQ ID NO: 4803 - DNA, 80 bp, Artificial Sequence
  Description of Artificial Sequence: Synthetic oligonucleotide
tgtatgggccgcgctaagtcagccggttcgtcaagtagcacagtactcgctgtggggccgcaagccggtcgcaactatgc

SEQ ID NO: 4804 - DNA, 80 bp, Artificial Sequence
  Description of Artificial Sequence: Synthetic oligonucleotide
tgtatgggccgcgctaagtcagccggttcgtcaagtagcaaatggttttccccaaggctccaagccggtcgcaactatgc

SEQ ID NO: 4805 - DNA, 80 bp, Artificial Sequence
  Description of Artificial Sequence: Synthetic oligonucleotide
tgtatgggccgcgctaagtcagccggttcgtcaagtagcaaggctccacacccatgactccaagccggtcgcaactatgc

SEQ ID NO: 4806 - DNA, 80 bp, Artificial Sequence
  Description of Artificial Sequence: Synthetic oligonucleotide
tgtatgggccgcgctaagtcagccggttcgtcaagtagcacataaggaagcttggccacacaagccggtcgcaactatgc

SEQ ID NO: 4807 - DNA, 80 bp, Artificial Sequence
  Description of Artificial Sequence: Synthetic oligonucleotide
tgtatgggccgcgctaagtcagccggttcgtcaagtagcaacacagccatacctgccatacaagccggtcgcaactatgc

SEQ ID NO: 4808 - DNA, 80 bp, Artificial Sequence
  Description of Artificial Sequence: Synthetic oligonucleotide
tgtatgggccgcgctaagtcagccggttcgtcaagtagcacagacccactgtccttgcaacaagccggtcgcaactatgc

SEQ ID NO: 4809 - DNA, 80 bp, Artificial Sequence
  Description of Artificial Sequence: Synthetic oligonucleotide
tgtatgggccgcgctaagtcagccggttcgtcaagtagcagcctcatgcgggacttcaagcaagccggtcgcaactatgc

SEQ ID NO: 4810 - DNA, 80 bp, Artificial Sequence
  Description of Artificial Sequence: Synthetic oligonucleotide
tgtatgggccgcgctaagtcagccggttcgtcaagtagcaactttggcaaaacgctcaggcaagccggtcgcaactatgc

SEQ ID NO: 4811 - DNA, 80 bp, Artificial Sequence
  Description of Artificial Sequence: Synthetic oligonucleotide
tgtatgggccgcgctaagtcagccggttcgtcaagtagcaattgcatgctttgaccagggcaagccggtcgcaactatgc

SEQ ID NO: 4812 - DNA, 80 bp, Artificial Sequence
  Description of Artificial Sequence: Synthetic oligonucleotide
tgtatgggccgcgctaagtcagccggttcgtcaagtagcatcccatcaacccctattcgacaagccggtcgcaactatgc

SEQ ID NO: 4813 - DNA, 80 bp, Artificial Sequence
  Description of Artificial Sequence: Synthetic oligonucleotide
tgtatgggccgcgctaagtcagccggttcgtcaagtagcaaagtggtagctgtgaagggacaagccggtcgcaactatgc

SEQ ID NO: 4814 - DNA, 80 bp, Artificial Sequence
  Description of Artificial Sequence: Synthetic oligonucleotide
tgtatgggccgcgctaagtcagccggttcgtcaagtagcaagcccctcttcacaactcttcaagccggtcgcaactatgc

SEQ ID NO: 4815 - DNA, 80 bp, Artificial Sequence
  Description of Artificial Sequence: Synthetic oligonucleotide
tgtatgggccgcgctaagtcagccggttcgtcaagtagcacggagactacgaggtgctcacaagccggtcgcaactatgc

SEQ ID NO: 4816 - DNA, 80 bp, Artificial Sequence
  Description of Artificial Sequence: Synthetic oligonucleotide
tgtatgggccgcgctaagtcagccggttcgtcaagtagcagcatgtgcgcgcgctaggtccaagccggtcgcaactatgc

SEQ ID NO: 4817 - DNA, 80 bp, Artificial Sequence
  Description of Artificial Sequence: Synthetic oligonucleotide
tgtatgggccgcgctaagtcagccggttcgtcaagtagcataggggttgcaagggcctcacaagccggtcgcaactatgc

SEQ ID NO: 4818 - DNA, 80 bp, Artificial Sequence
  Description of Artificial Sequence: Synthetic oligonucleotide
tgtatgggccgcgctaagtcagccggttcgtcaagtagcatttgacacctgacgctgtggcaagccggtcgcaactatgc

SEQ ID NO: 4819 - DNA, 80 bp, Artificial Sequence
  Description of Artificial Sequence: Synthetic oligonucleotide
tgtatgggccgcgctaagtcagccggttcgtcaagtagcattggtgccttcctccaaacccaagccggtcgcaactatgc

SEQ ID NO: 4820 - DNA, 80 bp, Artificial Sequence
  Description of Artificial Sequence: Synthetic oligonucleotide
tgtatgggccgcgctaagtcagccggttcgtcaagtagcactttgcctgctgggaacattcaagccggtcgcaactatgc

SEQ ID NO: 4821 - DNA, 80 bp, Artificial Sequence
  Description of Artificial Sequence: Synthetic oligonucleotide
tgtatgggccgcgctaagtcagccggttcgtcaagtagcagcagtgtaaagcttgccagacaagccggtcgcaactatgc

SEQ ID NO: 4822 - DNA, 80 bp, Artificial Sequence
  Description of Artificial Sequence: Synthetic oligonucleotide
tgtatgggccgcgctaagtcagccggttcgtcaagtagcaggagtggttggggagtcgcccaagccggtcgcaactatgc

SEQ ID NO: 4823 - DNA, 80 bp, Artificial Sequence
  Description of Artificial Sequence: Synthetic oligonucleotide
tgtatgggccgcgctaagtcagccggttcgtcaagtagcatgaccaaaagcaaaaggcctcaagccggtcgcaactatgc

SEQ ID NO: 4824 - DNA, 80 bp, Artificial Sequence
  Description of Artificial Sequence: Synthetic oligonucleotide
tgtatgggccgcgctaagtcagccggttcgtcaagtagcactctgcaggcctcacacaggcaagccggtcgcaactatgc

SEQ ID NO: 4825 - DNA, 80 bp, Artificial Sequence
  Description of Artificial Sequence: Synthetic oligonucleotide
tgtatgggccgcgctaagtcagccggttcgtcaagtagcaagcactcaggcttcctctgacaagccggtcgcaactatgc

SEQ ID NO: 4826 - DNA, 80 bp, Artificial Sequence
  Description of Artificial Sequence: Synthetic oligonucleotide
tgtatgggccgcgctaagtcagccggttcgtcaagtagcacttccccactaggctggccacaagccggtcgcaactatgc

SEQ ID NO: 4827 - DNA, 80 bp, Artificial Sequence
  Description of Artificial Sequence: Synthetic oligonucleotide
tgtatgggccgcgctaagtcagccggttcgtcaagtagcaaagaaaagtcacaagggcgccaagccggtcgcaactatgc

SEQ ID NO: 4828 - DNA, 80 bp, Artificial Sequence
  Description of Artificial Sequence: Synthetic oligonucleotide
tgtatgggccgcgctaagtcagccggttcgtcaagtagcactggaatggttggtgactgccaagccggtcgcaactatgc

SEQ ID NO: 4829 - DNA, 80 bp, Artificial Sequence
  Description of Artificial Sequence: Synthetic oligonucleotide
tgtatgggccgcgctaagtcagccggttcgtcaagtagcaaactctccccaaaccatcctcaagccggtcgcaactatgc

SEQ ID NO: 4830 - DNA, 80 bp, Artificial Sequence
  Description of Artificial Sequence: Synthetic oligonucleotide
tgtatgggccgcgctaagtcagccggttcgtcaagtagcactaaaggggaacttgcctggcaagccggtcgcaactatgc

SEQ ID NO: 4831 - DNA, 80 bp, Artificial Sequence
  Description of Artificial Sequence: Synthetic oligonucleotide
tgtatgggccgcgctaagtcagccggttcgtcaagtagcaccccatcacaaagcccacaacaagccggtcgcaactatgc

SEQ ID NO: 4832 - DNA, 80 bp, Artificial Sequence
  Description of Artificial Sequence: Synthetic oligonucleotide
tgtatgggccgcgctaagtcagccggttcgtcaagtagcagaccaaacacgggtccacagcaagccggtcgcaactatgc

SEQ ID NO: 4833 - DNA, 80 bp, Artificial Sequence
  Description of Artificial Sequence: Synthetic oligonucleotide
tgtatgggccgcgctaagtcagccggttcgtcaagtagcaggctcagtatggcatgcaagcaagccggtcgcaactatgc

SEQ ID NO: 4834 - DNA, 80 bp, Artificial Sequence
  Description of Artificial Sequence: Synthetic oligonucleotide
tgtatgggccgcgctaagtcagccggttcgtcaagtagcaagttgggagaacctgttccacaagccggtcgcaactatgc

SEQ ID NO: 4835 - DNA, 80 bp, Artificial Sequence
  Description of Artificial Sequence: Synthetic oligonucleotide
tgtatgggccgcgctaagtcagccggttcgtcaagtagcaaacgttacggtgttccttgccaagccggtcgcaactatgc

SEQ ID NO: 4836 - DNA, 80 bp, Artificial Sequence
  Description of Artificial Sequence: Synthetic oligonucleotide
tgtatgggccgcgctaagtcagccggttcgtcaagtagcaatgcgaatgggcctgtggggcaagccggtcgcaactatgc

SEQ ID NO: 4837 - DNA, 80 bp, Artificial Sequence
  Description of Artificial Sequence: Synthetic oligonucleotide
tgtatgggccgcgctaagtcagccggttcgtcaagtagcaaggagggcagcatgtcgtagcaagccggtcgcaactatgc

SEQ ID NO: 4838 - DNA, 80 bp, Artificial Sequence
  Description of Artificial Sequence: Synthetic oligonucleotide
tgtatgggccgcgctaagtcagccggttcgtcaagtagcagtcagggttgggaacggcaccaagccggtcgcaactatgc

SEQ ID NO: 4839 - DNA, 80 bp, Artificial Sequence
  Description of Artificial Sequence: Synthetic oligonucleotide
tgtatgggccgcgctaagtcagccggttcgtcaagtagcattggcagttatcagcaggctcaagccggtcgcaactatgc

SEQ ID NO: 4840 - DNA, 80 bp, Artificial Sequence
  Description of Artificial Sequence: Synthetic oligonucleotide
tgtatgggccgcgctaagtcagccggttcgtcaagtagcaaacacctcagtcccaacacccaagccggtcgcaactatgc

SEQ ID NO: 4841 - DNA, 80 bp, Artificial Sequence
  Description of Artificial Sequence: Synthetic oligonucleotide
tgtatgggccgcgctaagtcagccggttcgtcaagtagcatttagactagggtgtgggcacaagccggtcgcaactatgc

SEQ ID NO: 4842 - DNA, 80 bp, Artificial Sequence
  Description of Artificial Sequence: Synthetic oligonucleotide
tgtatgggccgcgctaagtcagccggttcgtcaagtagcacaattcatggagggctgggccaagccggtcgcaactatgc

SEQ ID NO: 4843 - DNA, 80 bp, Artificial Sequence
  Description of Artificial Sequence: Synthetic oligonucleotide
tgtatgggccgcgctaagtcagccggttcgtcaagtagcaacatgcaacacccaccccaacaagccggtcgcaactatgc

SEQ ID NO: 4844 - DNA, 80 bp, Artificial Sequence
  Description of Artificial Sequence: Synthetic oligonucleotide
tgtatgggccgcgctaagtcagccggttcgtcaagtagcaagggaagcaagcataggactcaagccggtcgcaactatgc

SEQ ID NO: 4845 - DNA, 80 bp, Artificial Sequence
  Description of Artificial Sequence: Synthetic oligonucleotide
tgtatgggccgcgctaagtcagccggttcgtcaagtagcagcactcaacaccctacacctcaagccggtcgcaactatgc

SEQ ID NO: 4846 - DNA, 80 bp, Artificial Sequence
  Description of Artificial Sequence: Synthetic oligonucleotide
tgtatgggccgcgctaagtcagccggttcgtcaagtagcaatgtcatatccctgggtccccaagccggtcgcaactatgc

SEQ ID NO: 4847 - DNA, 80 bp, Artificial Sequence
  Description of Artificial Sequence: Synthetic oligonucleotide
tgtatgggccgcgctaagtcagccggttcgtcaagtagcaatcttccaggaaccagggcccaagccggtcgcaactatgc

SEQ ID NO: 4848 - DNA, 80 bp, Artificial Sequence
  Description of Artificial Sequence: Synthetic oligonucleotide
tgtatgggccgcgctaagtcagccggttcgtcaagtagcagggtgggctggggtttcgatcaagccggtcgcaactatgc

SEQ ID NO: 4849 - DNA, 80 bp, Artificial Sequence
  Description of Artificial Sequence: Synthetic oligonucleotide
tgtatgggccgcgctaagtcagccggttcgtcaagtagcaaactaccacgtactccctcccaagccggtcgcaactatgc

SEQ ID NO: 4850 - DNA, 80 bp, Artificial Sequence
  Description of Artificial Sequence: Synthetic oligonucleotide
tgtatgggccgcgctaagtcagccggttcgtcaagtagcaagaaagagctggtcccaagtcaagccggtcgcaactatgc

SEQ ID NO: 4851 - DNA, 80 bp, Artificial Sequence
  Description of Artificial Sequence: Synthetic oligonucleotide
tgtatgggccgcgctaagtcagccggttcgtcaagtagcaactagtggggctccatctgtcaagccggtcgcaactatgc

SEQ ID NO: 4852 - DNA, 80 bp, Artificial Sequence
  Description of Artificial Sequence: Synthetic oligonucleotide
tgtatgggccgcgctaagtcagccggttcgtcaagtagcatagtatagtgtggggcagggcaagccggtcgcaactatgc

SEQ ID NO: 4853 - DNA, 80 bp, Artificial Sequence
  Description of Artificial Sequence: Synthetic oligonucleotide
tgtatgggccgcgctaagtcagccggttcgtcaagtagcagcaccaatgcctccaccttccaagccggtcgcaactatgc

SEQ ID NO: 4854 - DNA, 80 bp, Artificial Sequence
  Description of Artificial Sequence: Synthetic oligonucleotide
tgtatgggccgcgctaagtcagccggttcgtcaagtagcagacactaccatgtaagcggccaagccggtcgcaactatgc

SEQ ID NO: 4855 - DNA, 80 bp, Artificial Sequence
  Description of Artificial Sequence: Synthetic oligonucleotide
tgtatgggccgcgctaagtcagccggttcgtcaagtagcactgcacctcaagcgtttgatcaagccggtcgcaactatgc

SEQ ID NO: 4856 - DNA, 80 bp, Artificial Sequence
  Description of Artificial Sequence: Synthetic oligonucleotide
tgtatgggccgcgctaagtcagccggttcgtcaagtagcatctttctccgcttatccccacaagccggtcgcaactatgc

SEQ ID NO: 4857 - DNA, 80 bp, Artificial Sequence
  Description of Artificial Sequence: Synthetic oligonucleotide
tgtatgggccgcgctaagtcagccggttcgtcaagtagcaagccaatgttgcatgtcagtcaagccggtcgcaactatgc

SEQ ID NO: 4858 - DNA, 80 bp, Artificial Sequence
  Description of Artificial Sequence: Synthetic oligonucleotide
tgtatgggccgcgctaagtcagccggttcgtcaagtagcaccctgaaactctggtgcgaacaagccggtcgcaactatgc

SEQ ID NO: 4859 - DNA, 80 bp, Artificial Sequence
  Description of Artificial Sequence: Synthetic oligonucleotide
tgtatgggccgcgctaagtcagccggttcgtcaagtagcacctgattggcgtcctcatctcaagccggtcgcaactatgc

SEQ ID NO: 4860 - DNA, 80 bp, Artificial Sequence
  Description of Artificial Sequence: Synthetic oligonucleotide
tgtatgggccgcgctaagtcagccggttcgtcaagtagcagctgggccactagcatcacccaagccggtcgcaactatgc

SEQ ID NO: 4861 - DNA, 80 bp, Artificial Sequence
  Description of Artificial Sequence: Synthetic oligonucleotide
tgtatgggccgcgctaagtcagccggttcgtcaagtagcacttccgcctctgaacgtggccaagccggtcgcaactatgc

SEQ ID NO: 4862 - DNA, 80 bp, Artificial Sequence
  Description of Artificial Sequence: Synthetic oligonucleotide
tgtatgggccgcgctaagtcagccggttcgtcaagtagcactggccctcttcatttggcgcaagccggtcgcaactatgc

SEQ ID NO: 4863 - DNA, 80 bp, Artificial Sequence
  Description of Artificial Sequence: Synthetic oligonucleotide
tgtatgggccgcgctaagtcagccggttcgtcaagtagcaagcgagatcatgacagtggccaagccggtcgcaactatgc

SEQ ID NO: 4864 - DNA, 80 bp, Artificial Sequence
  Description of Artificial Sequence: Synthetic oligonucleotide
tgtatgggccgcgctaagtcagccggttcgtcaagtagcagctcctgtgaccatagcgagcaagccggtcgcaactatgc

SEQ ID NO: 4865 - DNA, 80 bp, Artificial Sequence
  Description of Artificial Sequence: Synthetic oligonucleotide
tgtatgggccgcgctaagtcagccggttcgtcaagtagcacgctaccacggcatgcctcccaagccggtcgcaactatgc

SEQ ID NO: 4866 - DNA, 80 bp, Artificial Sequence
  Description of Artificial Sequence: Synthetic oligonucleotide
tgtatgggccgcgctaagtcagccggttcgtcaagtagcaccgatggggtggcctacacgcaagccggtcgcaactatgc

SEQ ID NO: 4867 - DNA, 80 bp, Artificial Sequence
  Description of Artificial Sequence: Synthetic oligonucleotide
tgtatgggccgcgctaagtcagccggttcgtcaagtagcaagccaacactggggtggaaacaagccggtcgcaactatgc

SEQ ID NO: 4868 - DNA, 80 bp, Artificial Sequence
  Description of Artificial Sequence: Synthetic oligonucleotide
tgtatgggccgcgctaagtcagccggttcgtcaagtagcaaggcgctctaagccctgagtcaagccggtcgcaactatgc

SEQ ID NO: 4869 - DNA, 80 bp, Artificial Sequence
  Description of Artificial Sequence: Synthetic oligonucleotide
tgtatgggccgcgctaagtcagccggttcgtcaagtagcagcgtgcacagcccaccatcccaagccggtcgcaactatgc

SEQ ID NO: 4870 - DNA, 80 bp, Artificial Sequence
  Description of Artificial Sequence: Synthetic oligonucleotide
tgtatgggccgcgctaagtcagccggttcgtcaagtagcactgccctcttgcgtttcctccaagccggtcgcaactatgc

SEQ ID NO: 4871 - DNA, 80 bp, Artificial Sequence
  Description of Artificial Sequence: Synthetic oligonucleotide
tgtatgggccgcgctaagtcagccggttcgtcaagtagcacccttgaggccacttgagggcaagccggtcgcaactatgc

SEQ ID NO: 4872 - DNA, 80 bp, Artificial Sequence
  Description of Artificial Sequence: Synthetic oligonucleotide
tgtatgggccgcgctaagtcagccggttcgtcaagtagcaaggggaagcctaacacactgcaagccggtcgcaactatgc

SEQ ID NO: 4873 - DNA, 80 bp, Artificial Sequence
  Description of Artificial Sequence: Synthetic oligonucleotide
tgtatgggccgcgctaagtcagccggttcgtcaagtagcaaggtttggtggtaggggtgacaagccggtcgcaactatgc

SEQ ID NO: 4874 - DNA, 80 bp, Artificial Sequence
  Description of Artificial Sequence: Synthetic oligonucleotide
tgtatgggccgcgctaagtctgtatgccgagcggttcagttcgggtcgtggaagatgggtcaagccggtcgcaactatgc

SEQ ID NO: 4875 - DNA, 80 bp, Artificial Sequence
  Description of Artificial Sequence: Synthetic oligonucleotide
tgtatgggccgcgctaagtctgtatgccgagcggttcagtccatgggctccaggacagtgcaagccggtcgcaactatgc

SEQ ID NO: 4876 - DNA, 80 bp, Artificial Sequence
  Description of Artificial Sequence: Synthetic oligonucleotide
tgtatgggccgcgctaagtctgtatgccgagcggttcagtgtctttctcggctggctgagcaagccggtcgcaactatgc

SEQ ID NO: 4877 - DNA, 80 bp, Artificial Sequence
  Description of Artificial Sequence: Synthetic oligonucleotide
tgtatgggccgcgctaagtctgtatgccgagcggttcagtggagactgcacaagtaccctcaagccggtcgcaactatgc

SEQ ID NO: 4878 - DNA, 80 bp, Artificial Sequence
  Description of Artificial Sequence: Synthetic oligonucleotide
tgtatgggccgcgctaagtctgtatgccgagcggttcagtaagattctccagaagcggcacaagccggtcgcaactatgc

SEQ ID NO: 4879 - DNA, 80 bp, Artificial Sequence
  Description of Artificial Sequence: Synthetic oligonucleotide
tgtatgggccgcgctaagtctgtatgccgagcggttcagtaactttgccttagcacgtgccaagccggtcgcaactatgc

SEQ ID NO: 4880 - DNA, 80 bp, Artificial Sequence
  Description of Artificial Sequence: Synthetic oligonucleotide
tgtatgggccgcgctaagtctgtatgccgagcggttcagtaggaggatccaggaacaggtcaagccggtcgcaactatgc

SEQ ID NO: 4881 - DNA, 80 bp, Artificial Sequence
  Description of Artificial Sequence: Synthetic oligonucleotide
tgtatgggccgcgctaagtctgtatgccgagcggttcagtcagaatccagaagcctgcctcaagccggtcgcaactatgc

SEQ ID NO: 4882 - DNA, 80 bp, Artificial Sequence
  Description of Artificial Sequence: Synthetic oligonucleotide
tgtatgggccgcgctaagtctgtatgccgagcggttcagttcgtgatttccccaaatgcccaagccggtcgcaactatgc

SEQ ID NO: 4883 - DNA, 80 bp, Artificial Sequence
  Description of Artificial Sequence: Synthetic oligonucleotide
tgtatgggccgcgctaagtctgtatgccgagcggttcagtccatcagaagcatttggggtcaagccggtcgcaactatgc

SEQ ID NO: 4884 - DNA, 80 bp, Artificial Sequence
  Description of Artificial Sequence: Synthetic oligonucleotide
tgtatgggccgcgctaagtctgtatgccgagcggttcagtaaaccacagtggagacaagccaagccggtcgcaactatgc

SEQ ID NO: 4885 - DNA, 80 bp, Artificial Sequence
  Description of Artificial Sequence: Synthetic oligonucleotide
tgtatgggccgcgctaagtctgtatgccgagcggttcagttgcacccactgtcttactgccaagccggtcgcaactatgc

SEQ ID NO: 4886 - DNA, 80 bp, Artificial Sequence
  Description of Artificial Sequence: Synthetic oligonucleotide
tgtatgggccgcgctaagtctgtatgccgagcggttcagtaatgcctggagaccctaccacaagccggtcgcaactatgc

SEQ ID NO: 4887 - DNA, 80 bp, Artificial Sequence
  Description of Artificial Sequence: Synthetic oligonucleotide
tgtatgggccgcgctaagtctgtatgccgagcggttcagtgtggcctgcacaactttactcaagccggtcgcaactatgc

SEQ ID NO: 4888 - DNA, 80 bp, Artificial Sequence
  Description of Artificial Sequence: Synthetic oligonucleotide
tgtatgggccgcgctaagtctgtatgccgagcggttcagttcacacgccacctgagtattcaagccggtcgcaactatgc

SEQ ID NO: 4889 - DNA, 80 bp, Artificial Sequence
  Description of Artificial Sequence: Synthetic oligonucleotide
tgtatgggccgcgctaagtctgtatgccgagcggttcagtccttccttacctctccagggcaagccggtcgcaactatgc

SEQ ID NO: 4890 - DNA, 80 bp, Artificial Sequence
  Description of Artificial Sequence: Synthetic oligonucleotide
tgtatgggccgcgctaagtctgtatgccgagcggttcagtacacacgaaggacagctctacaagccggtcgcaactatgc

SEQ ID NO: 4891 - DNA, 80 bp, Artificial Sequence
  Description of Artificial Sequence: Synthetic oligonucleotide
tgtatgggccgcgctaagtctgtatgccgagcggttcagtttggttgcatgtccaagaggcaagccggtcgcaactatgc

SEQ ID NO: 4892 - DNA, 80 bp, Artificial Sequence
  Description of Artificial Sequence: Synthetic oligonucleotide
tgtatgggccgcgctaagtctgtatgccgagcggttcagtaaccttgctggagctagtctcaagccggtcgcaactatgc

SEQ ID NO: 4893 - DNA, 80 bp, Artificial Sequence
  Description of Artificial Sequence: Synthetic oligonucleotide
tgtatgggccgcgctaagtctgtatgccgagcggttcagtcactgaccccacctttccgtcaagccggtcgcaactatgc

SEQ ID NO: 4894 - DNA, 80 bp, Artificial Sequence
  Description of Artificial Sequence: Synthetic oligonucleotide
tgtatgggccgcgctaagtctgtatgccgagcggttcagtaccatgaagccagaagcctacaagccggtcgcaactatgc

SEQ ID NO: 4895 - DNA, 80 bp, Artificial Sequence
  Description of Artificial Sequence: Synthetic oligonucleotide
tgtatgggccgcgctaagtctgtatgccgagcggttcagttgctcttggaaacctgtggccaagccggtcgcaactatgc

SEQ ID NO: 4896 - DNA, 80 bp, Artificial Sequence
  Description of Artificial Sequence: Synthetic oligonucleotide
tgtatgggccgcgctaagtctgtatgccgagcggttcagtctatcacccagtgacaggcacaagccggtcgcaactatgc

SEQ ID NO: 4897 - DNA, 80 bp, Artificial Sequence
  Description of Artificial Sequence: Synthetic oligonucleotide
tgtatgggccgcgctaagtctgtatgccgagcggttcagtatctctccaggttctgtgcacaagccggtcgcaactatgc

SEQ ID NO: 4898 - DNA, 80 bp, Artificial Sequence
  Description of Artificial Sequence: Synthetic oligonucleotide
tgtatgggccgcgctaagtctgtatgccgagcggttcagtggattaggtggcaccatgggcaagccggtcgcaactatgc

SEQ ID NO: 4899 - DNA, 80 bp, Artificial Sequence
  Description of Artificial Sequence: Synthetic oligonucleotide
tgtatgggccgcgctaagtctgtatgccgagcggttcagtggtaggcaccattttacgcccaagccggtcgcaactatgc

SEQ ID NO: 4900 - DNA, 80 bp, Artificial Sequence
  Description of Artificial Sequence: Synthetic oligonucleotide
tgtatgggccgcgctaagtctgtatgccgagcggttcagtctccaaaggcaatcagcgttcaagccggtcgcaactatgc

SEQ ID NO: 4901 - DNA, 80 bp, Artificial Sequence
  Description of Artificial Sequence: Synthetic oligonucleotide
tgtatgggccgcgctaagtctgtatgccgagcggttcagtgcctttactggagggttgggcaagccggtcgcaactatgc

SEQ ID NO: 4902 - DNA, 80 bp, Artificial Sequence
  Description of Artificial Sequence: Synthetic oligonucleotide
tgtatgggccgcgctaagtctgtatgccgagcggttcagttggcttggtcttgtgttgtgcaagccggtcgcaactatgc

SEQ ID NO: 4903 - DNA, 80 bp, Artificial Sequence
  Description of Artificial Sequence: Synthetic oligonucleotide
tgtatgggccgcgctaagtctgtatgccgagcggttcagtcatgttgtcttgggttgcctcaagccggtcgcaactatgc

SEQ ID NO: 4904 - DNA, 80 bp, Artificial Sequence
  Description of Artificial Sequence: Synthetic oligonucleotide
tgtatgggccgcgctaagtctgtatgccgagcggttcagtgcagagctggtatgaatgcacaagccggtcgcaactatgc

SEQ ID NO: 4905 - DNA, 80 bp, Artificial Sequence
  Description of Artificial Sequence: Synthetic oligonucleotide
tgtatgggccgcgctaagtctgtatgccgagcggttcagtttgggtgaatttgggcatcccaagccggtcgcaactatgc

SEQ ID NO: 4906 - DNA, 80 bp, Artificial Sequence
  Description of Artificial Sequence: Synthetic oligonucleotide
tgtatgggccgcgctaagtctgtatgccgagcggttcagtttccatggttagcctgtccccaagccggtcgcaactatgc

SEQ ID NO: 4907 - DNA, 80 bp, Artificial Sequence
  Description of Artificial Sequence: Synthetic oligonucleotide
tgtatgggccgcgctaagtctgtatgccgagcggttcagtagagccacctatccaacccacaagccggtcgcaactatgc

SEQ ID NO: 4908 - DNA, 80 bp, Artificial Sequence
  Description of Artificial Sequence: Synthetic oligonucleotide
tgtatgggccgcgctaagtctgtatgccgagcggttcagtaatatgggcaattgtgggcacaagccggtcgcaactatgc

SEQ ID NO: 4909 - DNA, 80 bp, Artificial Sequence
  Description of Artificial Sequence: Synthetic oligonucleotide
tgtatgggccgcgctaagtctgtatgccgagcggttcagtgcttgccagggaatccaaagcaagccggtcgcaactatgc

SEQ ID NO: 4910 - DNA, 80 bp, Artificial Sequence
  Description of Artificial Sequence: Synthetic oligonucleotide
tgtatgggccgcgctaagtctgtatgccgagcggttcagtaatggtcagcccggggtcatcaagccggtcgcaactatgc

SEQ ID NO: 4911 - DNA, 80 bp, Artificial Sequence
  Description of Artificial Sequence: Synthetic oligonucleotide
tgtatgggccgcgctaagtctgtatgccgagcggttcagtggggagccgagaagagggagcaagccggtcgcaactatgc

SEQ ID NO: 4912 - DNA, 80 bp, Artificial Sequence
  Description of Artificial Sequence: Synthetic oligonucleotide
tgtatgggccgcgctaagtctgtatgccgagcggttcagttgatgcaaaacccagacagccaagccggtcgcaactatgc

SEQ ID NO: 4913 - DNA, 80 bp, Artificial Sequence
  Description of Artificial Sequence: Synthetic oligonucleotide
tgtatgggccgcgctaagtctgtatgccgagcggttcagtacagtgttcttcggagcacacaagccggtcgcaactatgc

SEQ ID NO: 4914 - DNA, 80 bp, Artificial Sequence
  Description of Artificial Sequence: Synthetic oligonucleotide
tgtatgggccgcgctaagtctgtatgccgagcggttcagttgtaatttgtgggctgtgggcaagccggtcgcaactatgc

SEQ ID NO: 4915 - DNA, 80 bp, Artificial Sequence
  Description of Artificial Sequence: Synthetic oligonucleotide
tgtatgggccgcgctaagtctgtatgccgagcggttcagttgacgaagtggcatggaagccaagccggtcgcaactatgc

SEQ ID NO: 4916 - DNA, 80 bp, Artificial Sequence
  Description of Artificial Sequence: Synthetic oligonucleotide
tgtatgggccgcgctaagtctgtatgccgagcggttcagtgcctgtcaaagcactccctacaagccggtcgcaactatgc

SEQ ID NO: 4917 - DNA, 80 bp, Artificial Sequence
  Description of Artificial Sequence: Synthetic oligonucleotide
tgtatgggccgcgctaagtctgtatgccgagcggttcagtatttcttgctggcggcgtcccaagccggtcgcaactatgc

SEQ ID NO: 4918 - DNA, 80 bp, Artificial Sequence
  Description of Artificial Sequence: Synthetic oligonucleotide
tgtatgggccgcgctaagtctgtatgccgagcggttcagtgagcgaggacggcagcgagacaagccggtcgcaactatgc

SEQ ID NO: 4919 - DNA, 80 bp, Artificial Sequence
  Description of Artificial Sequence: Synthetic oligonucleotide
tgtatgggccgcgctaagtctgtatgccgagcggttcagttagcattcatcttggcacgccaagccggtcgcaactatgc

SEQ ID NO: 4920 - DNA, 80 bp, Artificial Sequence
  Description of Artificial Sequence: Synthetic oligonucleotide
tgtatgggccgcgctaagtctgtatgccgagcggttcagttggaaagcgggagatcatcccaagccggtcgcaactatgc

SEQ ID NO: 4921 - DNA, 80 bp, Artificial Sequence
  Description of Artificial Sequence: Synthetic oligonucleotide
tgtatgggccgcgctaagtctgtatgccgagcggttcagtccacctctcaagggcttctgcaagccggtcgcaactatgc

SEQ ID NO: 4922 - DNA, 80 bp, Artificial Sequence
  Description of Artificial Sequence: Synthetic oligonucleotide
tgtatgggccgcgctaagtctgtatgccgagcggttcagtttagctgctatgcacttggccaagccggtcgcaactatgc

SEQ ID NO: 4923 - DNA, 80 bp, Artificial Sequence
  Description of Artificial Sequence: Synthetic oligonucleotide
tgtatgggccgcgctaagtctgtatgccgagcggttcagtttcgcagattatctcggggacaagccggtcgcaactatgc

SEQ ID NO: 4924 - DNA, 80 bp, Artificial Sequence
  Description of Artificial Sequence: Synthetic oligonucleotide
tgtatgggccgcgctaagtctgtatgccgagcggttcagttaatggtgggtgactacgggcaagccggtcgcaactatgc

SEQ ID NO: 4925 - DNA, 80 bp, Artificial Sequence
  Description of Artificial Sequence: Synthetic oligonucleotide
tgtatgggccgcgctaagtctgtatgccgagcggttcagtggtccaacccagagacctaacaagccggtcgcaactatgc

SEQ ID NO: 4926 - DNA, 80 bp, Artificial Sequence
  Description of Artificial Sequence: Synthetic oligonucleotide
tgtatgggccgcgctaagtctgtatgccgagcggttcagttgcaaagaatgactcctgcccaagccggtcgcaactatgc

SEQ ID NO: 4927 - DNA, 80 bp, Artificial Sequence
  Description of Artificial Sequence: Synthetic oligonucleotide
tgtatgggccgcgctaagtctgtatgccgagcggttcagtttgagtctggcaaaaccccacaagccggtcgcaactatgc

SEQ ID NO: 4928 - DNA, 80 bp, Artificial Sequence
  Description of Artificial Sequence: Synthetic oligonucleotide
tgtatgggccgcgctaagtctgtatgccgagcggttcagtaccagtagggatgcatttgccaagccggtcgcaactatgc

SEQ ID NO: 4929 - DNA, 80 bp, Artificial Sequence
  Description of Artificial Sequence: Synthetic oligonucleotide
tgtatgggccgcgctaagtctgtatgccgagcggttcagtcccagtccaatagagcccatcaagccggtcgcaactatgc

SEQ ID NO: 4930 - DNA, 80 bp, Artificial Sequence
  Description of Artificial Sequence: Synthetic oligonucleotide
tgtatgggccgcgctaagtctgtatgccgagcggttcagtcacaaacttgagccagagggcaagccggtcgcaactatgc

SEQ ID NO: 4931 - DNA, 80 bp, Artificial Sequence
  Description of Artificial Sequence: Synthetic oligonucleotide
tgtatgggccgcgctaagtctgtatgccgagcggttcagtaggaggagttctttgtggcccaagccggtcgcaactatgc

SEQ ID NO: 4932 - DNA, 80 bp, Artificial Sequence
  Description of Artificial Sequence: Synthetic oligonucleotide
tgtatgggccgcgctaagtctgtatgccgagcggttcagtcgaggtgtgcgaggagagctcaagccggtcgcaactatgc

SEQ ID NO: 4933 - DNA, 80 bp, Artificial Sequence
  Description of Artificial Sequence: Synthetic oligonucleotide
tgtatgggccgcgctaagtctgtatgccgagcggttcagtgtggcatccaatggtcatgacaagccggtcgcaactatgc

SEQ ID NO: 4934 - DNA, 80 bp, Artificial Sequence
  Description of Artificial Sequence: Synthetic oligonucleotide
tgtatgggccgcgctaagtcagccggttcgtcaagtagcaacatccgtaagaactggggccaagccggtcgcaactatgc

SEQ ID NO: 4935 - DNA, 80 bp, Artificial Sequence
  Description of Artificial Sequence: Synthetic oligonucleotide
tgtatgggccgcgctaagtcagccggttcgtcaagtagcagggcagcatgaggttttctccaagccggtcgcaactatgc

SEQ ID NO: 4936 - DNA, 80 bp, Artificial Sequence
  Description of Artificial Sequence: Synthetic oligonucleotide
tgtatgggccgcgctaagtcagccggttcgtcaagtagcacttggacagcctgacattcccaagccggtcgcaactatgc

SEQ ID NO: 4937 - DNA, 80 bp, Artificial Sequence
  Description of Artificial Sequence: Synthetic oligonucleotide
tgtatgggccgcgctaagtcagccggttcgtcaagtagcacctaagcccagacagccccacaagccggtcgcaactatgc

SEQ ID NO: 4938 - DNA, 80 bp, Artificial Sequence
  Description of Artificial Sequence: Synthetic oligonucleotide
tgtatgggccgcgctaagtcagccggttcgtcaagtagcacctgcaggtgcttgtgtattcaagccggtcgcaactatgc

SEQ ID NO: 4939 - DNA, 80 bp, Artificial Sequence
  Description of Artificial Sequence: Synthetic oligonucleotide
tgtatgggccgcgctaagtcagccggttcgtcaagtagcaggaggcaggtggacacgaaacaagccggtcgcaactatgc

SEQ ID NO: 4940 - DNA, 80 bp, Artificial Sequence
  Description of Artificial Sequence: Synthetic oligonucleotide
tgtatgggccgcgctaagtcagccggttcgtcaagtagcagatgctcagtggggatgctccaagccggtcgcaactatgc

SEQ ID NO: 4941 - DNA, 80 bp, Artificial Sequence
  Description of Artificial Sequence: Synthetic oligonucleotide
tgtatgggccgcgctaagtcagccggttcgtcaagtagcattcagactggagctcagagccaagccggtcgcaactatgc

SEQ ID NO: 4942 - DNA, 80 bp, Artificial Sequence
  Description of Artificial Sequence: Synthetic oligonucleotide
tgtatgggccgcgctaagtcagccggttcgtcaagtagcattaagggatgatgccggtcccaagccggtcgcaactatgc

SEQ ID NO: 4943 - DNA, 80 bp, Artificial Sequence
  Description of Artificial Sequence: Synthetic oligonucleotide
tgtatgggccgcgctaagtcagccggttcgtcaagtagcaaattggattcggcactcagccaagccggtcgcaactatgc

SEQ ID NO: 4944 - DNA, 80 bp, Artificial Sequence
  Description of Artificial Sequence: Synthetic oligonucleotide
tgtatgggccgcgctaagtcagccggttcgtcaagtagcagagcagacatgaagcagggacaagccggtcgcaactatgc

SEQ ID NO: 4945 - DNA, 80 bp, Artificial Sequence
  Description of Artificial Sequence: Synthetic oligonucleotide
tgtatgggccgcgctaagtcagccggttcgtcaagtagcagtgtgaacctatgtggcaggcaagccggtcgcaactatgc

SEQ ID NO: 4946 - DNA, 80 bp, Artificial Sequence
  Description of Artificial Sequence: Synthetic oligonucleotide
tgtatgggccgcgctaagtcagccggttcgtcaagtagcactggggcataagagttcagccaagccggtcgcaactatgc

SEQ ID NO: 4947 - DNA, 80 bp, Artificial Sequence
  Description of Artificial Sequence: Synthetic oligonucleotide
tgtatgggccgcgctaagtcagccggttcgtcaagtagcaagccgaacttccaatgcaaccaagccggtcgcaactatgc

SEQ ID NO: 4948 - DNA, 80 bp, Artificial Sequence
  Description of Artificial Sequence: Synthetic oligonucleotide
tgtatgggccgcgctaagtcagccggttcgtcaagtagcaatttggattcaagctggcgacaagccggtcgcaactatgc

SEQ ID NO: 4949 - DNA, 80 bp, Artificial Sequence
  Description of Artificial Sequence: Synthetic oligonucleotide
tgtatgggccgcgctaagtcagccggttcgtcaagtagcacagtgctgtccacgcataaacaagccggtcgcaactatgc

SEQ ID NO: 4950 - DNA, 80 bp, Artificial Sequence
  Description of Artificial Sequence: Synthetic oligonucleotide
tgtatgggccgcgctaagtcagccggttcgtcaagtagcaaaggggttgatcctgagaggcaagccggtcgcaactatgc

SEQ ID NO: 4951 - DNA, 80 bp, Artificial Sequence
  Description of Artificial Sequence: Synthetic oligonucleotide
tgtatgggccgcgctaagtcagccggttcgtcaagtagcacaccccatgtggagaagtggcaagccggtcgcaactatgc

SEQ ID NO: 4952 - DNA, 80 bp, Artificial Sequence
  Description of Artificial Sequence: Synthetic oligonucleotide
tgtatgggccgcgctaagtcagccggttcgtcaagtagcaaagacggttttgctgtgctgcaagccggtcgcaactatgc

SEQ ID NO: 4953 - DNA, 80 bp, Artificial Sequence
  Description of Artificial Sequence: Synthetic oligonucleotide
tgtatgggccgcgctaagtcagccggttcgtcaagtagcaagccaaggttttcctgaggacaagccggtcgcaactatgc

SEQ ID NO: 4954 - DNA, 80 bp, Artificial Sequence
  Description of Artificial Sequence: Synthetic oligonucleotide
tgtatgggccgcgctaagtcagccggttcgtcaagtagcaccgactacagcaacttgggccaagccggtcgcaactatgc

SEQ ID NO: 4955 - DNA, 80 bp, Artificial Sequence
  Description of Artificial Sequence: Synthetic oligonucleotide
tgtatgggccgcgctaagtcagccggttcgtcaagtagcatgggcggtggaactagcggccaagccggtcgcaactatgc

SEQ ID NO: 4956 - DNA, 80 bp, Artificial Sequence
  Description of Artificial Sequence: Synthetic oligonucleotide
tgtatgggccgcgctaagtcagccggttcgtcaagtagcacttggctggcaacggaccctcaagccggtcgcaactatgc

SEQ ID NO: 4957 - DNA, 80 bp, Artificial Sequence
  Description of Artificial Sequence: Synthetic oligonucleotide
tgtatgggccgcgctaagtcagccggttcgtcaagtagcatgggttgatgatccagagcacaagccggtcgcaactatgc

SEQ ID NO: 4958 - DNA, 80 bp, Artificial Sequence
  Description of Artificial Sequence: Synthetic oligonucleotide
tgtatgggccgcgctaagtcagccggttcgtcaagtagcatgctcacacatgtccagaggcaagccggtcgcaactatgc

SEQ ID NO: 4959 - DNA, 80 bp, Artificial Sequence
  Description of Artificial Sequence: Synthetic oligonucleotide
tgtatgggccgcgctaagtcagccggttcgtcaagtagcaactgcagcagggatctagtccaagccggtcgcaactatgc

SEQ ID NO: 4960 - DNA, 80 bp, Artificial Sequence
  Description of Artificial Sequence: Synthetic oligonucleotide
tgtatgggccgcgctaagtcagccggttcgtcaagtagcaatgatggtatcagccccagtcaagccggtcgcaactatgc

SEQ ID NO: 4961 - DNA, 80 bp, Artificial Sequence
  Description of Artificial Sequence: Synthetic oligonucleotide
tgtatgggccgcgctaagtcagccggttcgtcaagtagcatgaccatgcaagggtacactcaagccggtcgcaactatgc

SEQ ID NO: 4962 - DNA, 80 bp, Artificial Sequence
  Description of Artificial Sequence: Synthetic oligonucleotide
tgtatgggccgcgctaagtcagccggttcgtcaagtagcatacagaataggggtctgggccaagccggtcgcaactatgc

SEQ ID NO: 4963 - DNA, 80 bp, Artificial Sequence
  Description of Artificial Sequence: Synthetic oligonucleotide
tgtatgggccgcgctaagtcagccggttcgtcaagtagcaatctgatccggtcgtgttgtcaagccggtcgcaactatgc

SEQ ID NO: 4964 - DNA, 80 bp, Artificial Sequence
  Description of Artificial Sequence: Synthetic oligonucleotide
tgtatgggccgcgctaagtcagccggttcgtcaagtagcaggtaagtgtccaaggcctcccaagccggtcgcaactatgc

SEQ ID NO: 4965 - DNA, 80 bp, Artificial Sequence
  Description of Artificial Sequence: Synthetic oligonucleotide
tgtatgggccgcgctaagtcagccggttcgtcaagtagcaaagttgttgcccatgagctccaagccggtcgcaactatgc

SEQ ID NO: 4966 - DNA, 80 bp, Artificial Sequence
  Description of Artificial Sequence: Synthetic oligonucleotide
tgtatgggccgcgctaagtcagccggttcgtcaagtagcactgcagttcagtgcttgccccaagccggtcgcaactatgc

SEQ ID NO: 4967 - DNA, 80 bp, Artificial Sequence
  Description of Artificial Sequence: Synthetic oligonucleotide
tgtatgggccgcgctaagtcagccggttcgtcaagtagcaccactgttggtctgcagagccaagccggtcgcaactatgc

SEQ ID NO: 4968 - DNA, 80 bp, Artificial Sequence
  Description of Artificial Sequence: Synthetic oligonucleotide
tgtatgggccgcgctaagtcagccggttcgtcaagtagcaacgccatatatcaggggtcccaagccggtcgcaactatgc

SEQ ID NO: 4969 - DNA, 80 bp, Artificial Sequence
  Description of Artificial Sequence: Synthetic oligonucleotide
tgtatgggccgcgctaagtcagccggttcgtcaagtagcacactggggtgccaccaacaccaagccggtcgcaactatgc

SEQ ID NO: 4970 - DNA, 80 bp, Artificial Sequence
  Description of Artificial Sequence: Synthetic oligonucleotide
tgtatgggccgcgctaagtcagccggttcgtcaagtagcagtggttacaactcaggtgcccaagccggtcgcaactatgc

SEQ ID NO: 4971 - DNA, 80 bp, Artificial Sequence
  Description of Artificial Sequence: Synthetic oligonucleotide
tgtatgggccgcgctaagtcagccggttcgtcaagtagcattctgtaggagttccggagccaagccggtcgcaactatgc

SEQ ID NO: 4972 - DNA, 80 bp, Artificial Sequence
  Description of Artificial Sequence: Synthetic oligonucleotide
tgtatgggccgcgctaagtcagccggttcgtcaagtagcaaatagcaaccccactctccacaagccggtcgcaactatgc

SEQ ID NO: 4973 - DNA, 80 bp, Artificial Sequence
  Description of Artificial Sequence: Synthetic oligonucleotide
tgtatgggccgcgctaagtcagccggttcgtcaagtagcatcatgactccacacctagcacaagccggtcgcaactatgc

SEQ ID NO: 4974 - DNA, 80 bp, Artificial Sequence
  Description of Artificial Sequence: Synthetic oligonucleotide
tgtatgggccgcgctaagtcagccggttcgtcaagtagcaattgaagggctcatctcccccaagccggtcgcaactatgc

SEQ ID NO: 4975 - DNA, 80 bp, Artificial Sequence
  Description of Artificial Sequence: Synthetic oligonucleotide
tgtatgggccgcgctaagtcagccggttcgtcaagtagcatctggtacgttttggtgcagcaagccggtcgcaactatgc

SEQ ID NO: 4976 - DNA, 80 bp, Artificial Sequence
  Description of Artificial Sequence: Synthetic oligonucleotide
tgtatgggccgcgctaagtcagccggttcgtcaagtagcacccctcggcatttggatggtcaagccggtcgcaactatgc

SEQ ID NO: 4977 - DNA, 80 bp, Artificial Sequence
  Description of Artificial Sequence: Synthetic oligonucleotide
tgtatgggccgcgctaagtcagccggttcgtcaagtagcaacagggaccaatgttgtgtgcaagccggtcgcaactatgc

SEQ ID NO: 4978 - DNA, 80 bp, Artificial Sequence
  Description of Artificial Sequence: Synthetic oligonucleotide
tgtatgggccgcgctaagtcagccggttcgtcaagtagcatatctccccatgttggtggccaagccggtcgcaactatgc

SEQ ID NO: 4979 - DNA, 80 bp, Artificial Sequence
  Description of Artificial Sequence: Synthetic oligonucleotide
tgtatgggccgcgctaagtcagccggttcgtcaagtagcactgcatacacaaccagtccccaagccggtcgcaactatgc

SEQ ID NO: 4980 - DNA, 80 bp, Artificial Sequence
  Description of Artificial Sequence: Synthetic oligonucleotide
tgtatgggccgcgctaagtcagccggttcgtcaagtagcatggatggatagcactgtgggcaagccggtcgcaactatgc

SEQ ID NO: 4981 - DNA, 80 bp, Artificial Sequence
  Description of Artificial Sequence: Synthetic oligonucleotide
tgtatgggccgcgctaagtcagccggttcgtcaagtagcaaaggggaggggtgttttagtcaagccggtcgcaactatgc

SEQ ID NO: 4982 - DNA, 80 bp, Artificial Sequence
  Description of Artificial Sequence: Synthetic oligonucleotide
tgtatgggccgcgctaagtcagccggttcgtcaagtagcagttttgccaatgtctcccctcaagccggtcgcaactatgc

SEQ ID NO: 4983 - DNA, 80 bp, Artificial Sequence
  Description of Artificial Sequence: Synthetic oligonucleotide
tgtatgggccgcgctaagtcagccggttcgtcaagtagcattcccttaaactaggccccgcaagccggtcgcaactatgc

SEQ ID NO: 4984 - DNA, 80 bp, Artificial Sequence
  Description of Artificial Sequence: Synthetic oligonucleotide
tgtatgggccgcgctaagtcagccggttcgtcaagtagcatgctggacacacagtagtggcaagccggtcgcaactatgc

SEQ ID NO: 4985 - DNA, 80 bp, Artificial Sequence
  Description of Artificial Sequence: Synthetic oligonucleotide
tgtatgggccgcgctaagtcagccggttcgtcaagtagcaatgcaaccaactccccttgccaagccggtcgcaactatgc

SEQ ID NO: 4986 - DNA, 80 bp, Artificial Sequence
  Description of Artificial Sequence: Synthetic oligonucleotide
tgtatgggccgcgctaagtcagccggttcgtcaagtagcatcagtgacgggagctaagaccaagccggtcgcaactatgc

SEQ ID NO: 4987 - DNA, 80 bp, Artificial Sequence
  Description of Artificial Sequence: Synthetic oligonucleotide
tgtatgggccgcgctaagtcagccggttcgtcaagtagcatcagctaggttgaaggggaacaagccggtcgcaactatgc

SEQ ID NO: 4988 - DNA, 80 bp, Artificial Sequence
  Description of Artificial Sequence: Synthetic oligonucleotide
tgtatgggccgcgctaagtcagccggttcgtcaagtagcaaaatgctagggctggaaggacaagccggtcgcaactatgc

SEQ ID NO: 4989 - DNA, 80 bp, Artificial Sequence
  Description of Artificial Sequence: Synthetic oligonucleotide
tgtatgggccgcgctaagtcagccggttcgtcaagtagcagaagtcttccccggaatcctcaagccggtcgcaactatgc

SEQ ID NO: 4990 - DNA, 80 bp, Artificial Sequence
  Description of Artificial Sequence: Synthetic oligonucleotide
tgtatgggccgcgctaagtcagccggttcgtcaagtagcatcctagcctttcctaccagccaagccggtcgcaactatgc

SEQ ID NO: 4991 - DNA, 80 bp, Artificial Sequence
  Description of Artificial Sequence: Synthetic oligonucleotide
tgtatgggccgcgctaagtcagccggttcgtcaagtagcactgttcagcccctggatttgcaagccggtcgcaactatgc

SEQ ID NO: 4992 - DNA, 80 bp, Artificial Sequence
  Description of Artificial Sequence: Synthetic oligonucleotide
tgtatgggccgcgctaagtcagccggttcgtcaagtagcaccggtgccacttgtaagtctcaagccggtcgcaactatgc

SEQ ID NO: 4993 - DNA, 80 bp, Artificial Sequence
  Description of Artificial Sequence: Synthetic oligonucleotide
tgtatgggccgcgctaagtcagccggttcgtcaagtagcaacaacctagtcacactggcccaagccggtcgcaactatgc

SEQ ID NO: 4994 - DNA, 80 bp, Artificial Sequence
  Description of Artificial Sequence: Synthetic oligonucleotide
tgtatgggccgcgctaagtcagccggttcgtcaagtagcaacccacacggctgtttaacacaagccggtcgcaactatgc

SEQ ID NO: 4995 - DNA, 80 bp, Artificial Sequence
  Description of Artificial Sequence: Synthetic oligonucleotide
tgtatgggccgcgctaagtcagccggttcgtcaagtagcatagcactcaactgcctaccacaagccggtcgcaactatgc

SEQ ID NO: 4996 - DNA, 80 bp, Artificial Sequence
  Description of Artificial Sequence: Synthetic oligonucleotide
tgtatgggccgcgctaagtcagccggttcgtcaagtagcactgaccgtcccctagccacacaagccggtcgcaactatgc

SEQ ID NO: 4997 - DNA, 80 bp, Artificial Sequence
  Description of Artificial Sequence: Synthetic oligonucleotide
tgtatgggccgcgctaagtcagccggttcgtcaagtagcacccggagcctgtgcctcgatcaagccggtcgcaactatgc

SEQ ID NO: 4998 - DNA, 80 bp, Artificial Sequence
  Description of Artificial Sequence: Synthetic oligonucleotide
tgtatgggccgcgctaagtcagccggttcgtcaagtagcactctgggtgaagagcctgtacaagccggtcgcaactatgc

SEQ ID NO: 4999 - DNA, 80 bp, Artificial Sequence
  Description of Artificial Sequence: Synthetic oligonucleotide
tgtatgggccgcgctaagtcagccggttcgtcaagtagcacccaggtggctatctctctccaagccggtcgcaactatgc

SEQ ID NO: 5000 - DNA, 80 bp, Artificial Sequence
  Description of Artificial Sequence: Synthetic oligonucleotide
tgtatgggccgcgctaagtcagccggttcgtcaagtagcagaggtggcataggttgggcccaagccggtcgcaactatgc

SEQ ID NO: 5001 - DNA, 80 bp, Artificial Sequence
  Description of Artificial Sequence: Synthetic oligonucleotide
tgtatgggccgcgctaagtcagccggttcgtcaagtagcatcttgctgggtagactcaggcaagccggtcgcaactatgc

SEQ ID NO: 5002 - DNA, 80 bp, Artificial Sequence
  Description of Artificial Sequence: Synthetic oligonucleotide
tgtatgggccgcgctaagtcagccggttcgtcaagtagcatggcaacttcatgcggttcacaagccggtcgcaactatgc

SEQ ID NO: 5003 - DNA, 80 bp, Artificial Sequence
  Description of Artificial Sequence: Synthetic oligonucleotide
tgtatgggccgcgctaagtcagccggttcgtcaagtagcagaacccagttaggatcccctcaagccggtcgcaactatgc

SEQ ID NO: 5004 - DNA, 80 bp, Artificial Sequence
  Description of Artificial Sequence: Synthetic oligonucleotide
tgtatgggccgcgctaagtcagccggttcgtcaagtagcactggactcagcacgtgcagccaagccggtcgcaactatgc

SEQ ID NO: 5005 - DNA, 80 bp, Artificial Sequence
  Description of Artificial Sequence: Synthetic oligonucleotide
tgtatgggccgcgctaagtcagccggttcgtcaagtagcactcactgtgagatcccaggacaagccggtcgcaactatgc

SEQ ID NO: 5006 - DNA, 80 bp, Artificial Sequence
  Description of Artificial Sequence: Synthetic oligonucleotide
tgtatgggccgcgctaagtcagccggttcgtcaagtagcacaaccacccaaaagtctggccaagccggtcgcaactatgc

SEQ ID NO: 5007 - DNA, 80 bp, Artificial Sequence
  Description of Artificial Sequence: Synthetic oligonucleotide
tgtatgggccgcgctaagtcagccggttcgtcaagtagcaccagtagttgctcgccctctcaagccggtcgcaactatgc

SEQ ID NO: 5008 - DNA, 80 bp, Artificial Sequence
  Description of Artificial Sequence: Synthetic oligonucleotide
tgtatgggccgcgctaagtcagccggttcgtcaagtagcatctcccagaccacaactcatcaagccggtcgcaactatgc

SEQ ID NO: 5009 - DNA, 80 bp, Artificial Sequence
  Description of Artificial Sequence: Synthetic oligonucleotide
tgtatgggccgcgctaagtcagccggttcgtcaagtagcaggtaaagcagcttcatgggtcaagccggtcgcaactatgc

SEQ ID NO: 5010 - DNA, 80 bp, Artificial Sequence
  Description of Artificial Sequence: Synthetic oligonucleotide
tgtatgggccgcgctaagtcagccggttcgtcaagtagcactggatgtgtgtcagttccgcaagccggtcgcaactatgc

SEQ ID NO: 5011 - DNA, 80 bp, Artificial Sequence
  Description of Artificial Sequence: Synthetic oligonucleotide
tgtatgggccgcgctaagtcagccggttcgtcaagtagcacttggctggctcttacatgccaagccggtcgcaactatgc

SEQ ID NO: 5012 - DNA, 80 bp, Artificial Sequence
  Description of Artificial Sequence: Synthetic oligonucleotide
tgtatgggccgcgctaagtcagccggttcgtcaagtagcaatctgagtcccataaggccacaagccggtcgcaactatgc

SEQ ID NO: 5013 - DNA, 80 bp, Artificial Sequence
  Description of Artificial Sequence: Synthetic oligonucleotide
tgtatgggccgcgctaagtcagccggttcgtcaagtagcatccaactgactgcactctcccaagccggtcgcaactatgc

SEQ ID NO: 5014 - DNA, 80 bp, Artificial Sequence
  Description of Artificial Sequence: Synthetic oligonucleotide
tgtatgggccgcgctaagtcagccggttcgtcaagtagcagttcccaccacagctgagaacaagccggtcgcaactatgc

SEQ ID NO: 5015 - DNA, 80 bp, Artificial Sequence
  Description of Artificial Sequence: Synthetic oligonucleotide
tgtatgggccgcgctaagtcagccggttcgtcaagtagcagacctggaatggcaaagcttcaagccggtcgcaactatgc

SEQ ID NO: 5016 - DNA, 80 bp, Artificial Sequence
  Description of Artificial Sequence: Synthetic oligonucleotide
tgtatgggccgcgctaagtcagccggttcgtcaagtagcaaaaacaagggcaacggaagccaagccggtcgcaactatgc

SEQ ID NO: 5017 - DNA, 80 bp, Artificial Sequence
  Description of Artificial Sequence: Synthetic oligonucleotide
tgtatgggccgcgctaagtcagccggttcgtcaagtagcatttcaaggggaacggagagccaagccggtcgcaactatgc

SEQ ID NO: 5018 - DNA, 80 bp, Artificial Sequence
  Description of Artificial Sequence: Synthetic oligonucleotide
tgtatgggccgcgctaagtcagccggttcgtcaagtagcaacgctcctattcctaccacccaagccggtcgcaactatgc

SEQ ID NO: 5019 - DNA, 80 bp, Artificial Sequence
  Description of Artificial Sequence: Synthetic oligonucleotide
tgtatgggccgcgctaagtcagccggttcgtcaagtagcagcctgaagacttgatgcacacaagccggtcgcaactatgc

SEQ ID NO: 5020 - DNA, 80 bp, Artificial Sequence
  Description of Artificial Sequence: Synthetic oligonucleotide
tgtatgggccgcgctaagtcagccggttcgtcaagtagcaaatctgctgcttgggtcggccaagccggtcgcaactatgc

SEQ ID NO: 5021 - DNA, 80 bp, Artificial Sequence
  Description of Artificial Sequence: Synthetic oligonucleotide
tgtatgggccgcgctaagtcagccggttcgtcaagtagcaatgtccacctgcagagggatcaagccggtcgcaactatgc

SEQ ID NO: 5022 - DNA, 80 bp, Artificial Sequence
  Description of Artificial Sequence: Synthetic oligonucleotide
tgtatgggccgcgctaagtcagccggttcgtcaagtagcagccaatctgctcagggtgcacaagccggtcgcaactatgc

SEQ ID NO: 5023 - DNA, 80 bp, Artificial Sequence
  Description of Artificial Sequence: Synthetic oligonucleotide
tgtatgggccgcgctaagtcagccggttcgtcaagtagcaaatgatctgcccgtggaacacaagccggtcgcaactatgc

SEQ ID NO: 5024 - DNA, 80 bp, Artificial Sequence
  Description of Artificial Sequence: Synthetic oligonucleotide
tgtatgggccgcgctaagtcagccggttcgtcaagtagcatgaccttgctcctacatccccaagccggtcgcaactatgc

SEQ ID NO: 5025 - DNA, 80 bp, Artificial Sequence
  Description of Artificial Sequence: Synthetic oligonucleotide
tgtatgggccgcgctaagtcagccggttcgtcaagtagcaaacctgtggccctggtaaggcaagccggtcgcaactatgc

SEQ ID NO: 5026 - DNA, 80 bp, Artificial Sequence
  Description of Artificial Sequence: Synthetic oligonucleotide
tgtatgggccgcgctaagtcagccggttcgtcaagtagcactgtgccccagaatcccaaccaagccggtcgcaactatgc

SEQ ID NO: 5027 - DNA, 80 bp, Artificial Sequence
  Description of Artificial Sequence: Synthetic oligonucleotide
tgtatgggccgcgctaagtcagccggttcgtcaagtagcaggtctggtcagttgtcacctcaagccggtcgcaactatgc

SEQ ID NO: 5028 - DNA, 80 bp, Artificial Sequence
  Description of Artificial Sequence: Synthetic oligonucleotide
tgtatgggccgcgctaagtcagccggttcgtcaagtagcattggctgcatagctgggttacaagccggtcgcaactatgc

SEQ ID NO: 5029 - DNA, 80 bp, Artificial Sequence
  Description of Artificial Sequence: Synthetic oligonucleotide
tgtatgggccgcgctaagtctgtatgccgagcggttcagtaaggtattgctgtggcgtttcaagccggtcgcaactatgc

SEQ ID NO: 5030 - DNA, 80 bp, Artificial Sequence
  Description of Artificial Sequence: Synthetic oligonucleotide
tgtatgggccgcgctaagtctgtatgccgagcggttcagtcacacagcttgggacaaagccaagccggtcgcaactatgc

SEQ ID NO: 5031 - DNA, 80 bp, Artificial Sequence
  Description of Artificial Sequence: Synthetic oligonucleotide
tgtatgggccgcgctaagtctgtatgccgagcggttcagtgcccattccagagcatcgctcaagccggtcgcaactatgc

SEQ ID NO: 5032 - DNA, 80 bp, Artificial Sequence
  Description of Artificial Sequence: Synthetic oligonucleotide
tgtatgggccgcgctaagtctgtatgccgagcggttcagtgctcgctggtgatccggggacaagccggtcgcaactatgc

SEQ ID NO: 5033 - DNA, 80 bp, Artificial Sequence
  Description of Artificial Sequence: Synthetic oligonucleotide
tgtatgggccgcgctaagtctgtatgccgagcggttcagtaggcgatcacaatcacggggcaagccggtcgcaactatgc

SEQ ID NO: 5034 - DNA, 80 bp, Artificial Sequence
  Description of Artificial Sequence: Synthetic oligonucleotide
tgtatgggccgcgctaagtctgtatgccgagcggttcagtaagggataactgcctttgcgcaagccggtcgcaactatgc

SEQ ID NO: 5035 - DNA, 80 bp, Artificial Sequence
  Description of Artificial Sequence: Synthetic oligonucleotide
tgtatgggccgcgctaagtctgtatgccgagcggttcagtagccaaactcagggaggaatcaagccggtcgcaactatgc

SEQ ID NO: 5036 - DNA, 80 bp, Artificial Sequence
  Description of Artificial Sequence: Synthetic oligonucleotide
tgtatgggccgcgctaagtctgtatgccgagcggttcagtccatctatggaccagtgggtcaagccggtcgcaactatgc

SEQ ID NO: 5037 - DNA, 80 bp, Artificial Sequence
  Description of Artificial Sequence: Synthetic oligonucleotide
tgtatgggccgcgctaagtctgtatgccgagcggttcagtccggctgtgagtgagaattccaagccggtcgcaactatgc

SEQ ID NO: 5038 - DNA, 80 bp, Artificial Sequence
  Description of Artificial Sequence: Synthetic oligonucleotide
tgtatgggccgcgctaagtctgtatgccgagcggttcagtaatgacgtggattacggtgccaagccggtcgcaactatgc

SEQ ID NO: 5039 - DNA, 80 bp, Artificial Sequence
  Description of Artificial Sequence: Synthetic oligonucleotide
tgtatgggccgcgctaagtctgtatgccgagcggttcagtactgcacatggacctaaggccaagccggtcgcaactatgc

SEQ ID NO: 5040 - DNA, 80 bp, Artificial Sequence
  Description of Artificial Sequence: Synthetic oligonucleotide
tgtatgggccgcgctaagtctgtatgccgagcggttcagtttggcgattaggctttgagccaagccggtcgcaactatgc

SEQ ID NO: 5041 - DNA, 80 bp, Artificial Sequence
  Description of Artificial Sequence: Synthetic oligonucleotide
tgtatgggccgcgctaagtctgtatgccgagcggttcagttgtgtgtagggacaatgggtcaagccggtcgcaactatgc

SEQ ID NO: 5042 - DNA, 80 bp, Artificial Sequence
  Description of Artificial Sequence: Synthetic oligonucleotide
tgtatgggccgcgctaagtctgtatgccgagcggttcagtatatgcagttgcgggaatgccaagccggtcgcaactatgc

SEQ ID NO: 5043 - DNA, 80 bp, Artificial Sequence
  Description of Artificial Sequence: Synthetic oligonucleotide
tgtatgggccgcgctaagtctgtatgccgagcggttcagtttgggtgcagtctgacagtgcaagccggtcgcaactatgc

SEQ ID NO: 5044 - DNA, 80 bp, Artificial Sequence
  Description of Artificial Sequence: Synthetic oligonucleotide
tgtatgggccgcgctaagtctgtatgccgagcggttcagtagagctccccgccatctacacaagccggtcgcaactatgc

SEQ ID NO: 5045 - DNA, 80 bp, Artificial Sequence
  Description of Artificial Sequence: Synthetic oligonucleotide
tgtatgggccgcgctaagtctgtatgccgagcggttcagttctgggtgcttgctcctacccaagccggtcgcaactatgc

SEQ ID NO: 5046 - DNA, 80 bp, Artificial Sequence
  Description of Artificial Sequence: Synthetic oligonucleotide
tgtatgggccgcgctaagtctgtatgccgagcggttcagttgctccatggcatgagaggtcaagccggtcgcaactatgc

SEQ ID NO: 5047 - DNA, 80 bp, Artificial Sequence
  Description of Artificial Sequence: Synthetic oligonucleotide
tgtatgggccgcgctaagtctgtatgccgagcggttcagtaactaaggtgcaatgcctcccaagccggtcgcaactatgc

SEQ ID NO: 5048 - DNA, 80 bp, Artificial Sequence
  Description of Artificial Sequence: Synthetic oligonucleotide
tgtatgggccgcgctaagtctgtatgccgagcggttcagtctgggtgagaaatgcgatggcaagccggtcgcaactatgc

SEQ ID NO: 5049 - DNA, 80 bp, Artificial Sequence
  Description of Artificial Sequence: Synthetic oligonucleotide
tgtatgggccgcgctaagtctgtatgccgagcggttcagttgtggctcttggcaatgtttcaagccggtcgcaactatgc

SEQ ID NO: 5050 - DNA, 80 bp, Artificial Sequence
  Description of Artificial Sequence: Synthetic oligonucleotide
tgtatgggccgcgctaagtctgtatgccgagcggttcagtcagctacaacaggtgtgcatcaagccggtcgcaactatgc

SEQ ID NO: 5051 - DNA, 80 bp, Artificial Sequence
  Description of Artificial Sequence: Synthetic oligonucleotide
tgtatgggccgcgctaagtctgtatgccgagcggttcagtagccaccgaatctaccaacccaagccggtcgcaactatgc

SEQ ID NO: 5052 - DNA, 80 bp, Artificial Sequence
  Description of Artificial Sequence: Synthetic oligonucleotide
tgtatgggccgcgctaagtctgtatgccgagcggttcagttctagatgtcttcggcaccacaagccggtcgcaactatgc

SEQ ID NO: 5053 - DNA, 80 bp, Artificial Sequence
  Description of Artificial Sequence: Synthetic oligonucleotide
tgtatgggccgcgctaagtctgtatgccgagcggttcagtttgagctaggtcttgggtgtcaagccggtcgcaactatgc

SEQ ID NO: 5054 - DNA, 80 bp, Artificial Sequence
  Description of Artificial Sequence: Synthetic oligonucleotide
tgtatgggccgcgctaagtctgtatgccgagcggttcagtcagccaaccccaatgagaagcaagccggtcgcaactatgc

SEQ ID NO: 5055 - DNA, 80 bp, Artificial Sequence
  Description of Artificial Sequence: Synthetic oligonucleotide
tgtatgggccgcgctaagtctgtatgccgagcggttcagtctccatgggaccgttcacatcaagccggtcgcaactatgc

SEQ ID NO: 5056 - DNA, 80 bp, Artificial Sequence
  Description of Artificial Sequence: Synthetic oligonucleotide
tgtatgggccgcgctaagtctgtatgccgagcggttcagtctcctgggagccctttgcctcaagccggtcgcaactatgc

SEQ ID NO: 5057 - DNA, 80 bp, Artificial Sequence
  Description of Artificial Sequence: Synthetic oligonucleotide
tgtatgggccgcgctaagtctgtatgccgagcggttcagtccacagagggcccttcctaccaagccggtcgcaactatgc

SEQ ID NO: 5058 - DNA, 80 bp, Artificial Sequence
  Description of Artificial Sequence: Synthetic oligonucleotide
tgtatgggccgcgctaagtctgtatgccgagcggttcagtaacagctgggtgccaaaagtcaagccggtcgcaactatgc

SEQ ID NO: 5059 - DNA, 80 bp, Artificial Sequence
  Description of Artificial Sequence: Synthetic oligonucleotide
tgtatgggccgcgctaagtctgtatgccgagcggttcagtacaaatcgctcacgaatgcccaagccggtcgcaactatgc

SEQ ID NO: 5060 - DNA, 80 bp, Artificial Sequence
  Description of Artificial Sequence: Synthetic oligonucleotide
tgtatgggccgcgctaagtctgtatgccgagcggttcagtcacttgtgcactaaggtgggcaagccggtcgcaactatgc

SEQ ID NO: 5061 - DNA, 80 bp, Artificial Sequence
  Description of Artificial Sequence: Synthetic oligonucleotide
tgtatgggccgcgctaagtctgtatgccgagcggttcagtagacagagttaaggtggggccaagccggtcgcaactatgc

SEQ ID NO: 5062 - DNA, 80 bp, Artificial Sequence
  Description of Artificial Sequence: Synthetic oligonucleotide
tgtatgggccgcgctaagtctgtatgccgagcggttcagttttaggcagactcccagtgacaagccggtcgcaactatgc

SEQ ID NO: 5063 - DNA, 80 bp, Artificial Sequence
  Description of Artificial Sequence: Synthetic oligonucleotide
tgtatgggccgcgctaagtctgtatgccgagcggttcagtaggtgcaagtctgagatggtcaagccggtcgcaactatgc

SEQ ID NO: 5064 - DNA, 80 bp, Artificial Sequence
  Description of Artificial Sequence: Synthetic oligonucleotide
tgtatgggccgcgctaagtctgtatgccgagcggttcagttgacacagaaatcatggccccaagccggtcgcaactatgc

SEQ ID NO: 5065 - DNA, 80 bp, Artificial Sequence
  Description of Artificial Sequence: Synthetic oligonucleotide
tgtatgggccgcgctaagtctgtatgccgagcggttcagtgtgcccagctaccggtatggcaagccggtcgcaactatgc

SEQ ID NO: 5066 - DNA, 80 bp, Artificial Sequence
  Description of Artificial Sequence: Synthetic oligonucleotide
tgtatgggccgcgctaagtctgtatgccgagcggttcagttgggtacaagacagcctacacaagccggtcgcaactatgc

SEQ ID NO: 5067 - DNA, 80 bp, Artificial Sequence
  Description of Artificial Sequence: Synthetic oligonucleotide
tgtatgggccgcgctaagtctgtatgccgagcggttcagtactacagaagctggacacctcaagccggtcgcaactatgc

SEQ ID NO: 5068 - DNA, 80 bp, Artificial Sequence
  Description of Artificial Sequence: Synthetic oligonucleotide
tgtatgggccgcgctaagtctgtatgccgagcggttcagtaggaaagtgtaagcgcctcacaagccggtcgcaactatgc

SEQ ID NO: 5069 - DNA, 80 bp, Artificial Sequence
  Description of Artificial Sequence: Synthetic oligonucleotide
tgtatgggccgcgctaagtctgtatgccgagcggttcagtatatgatgtggctgccgaggcaagccggtcgcaactatgc

SEQ ID NO: 5070 - DNA, 80 bp, Artificial Sequence
  Description of Artificial Sequence: Synthetic oligonucleotide
tgtatgggccgcgctaagtctgtatgccgagcggttcagtcactggctcgcctgatgcagcaagccggtcgcaactatgc

SEQ ID NO: 5071 - DNA, 80 bp, Artificial Sequence
  Description of Artificial Sequence: Synthetic oligonucleotide
tgtatgggccgcgctaagtctgtatgccgagcggttcagtaggctctgtaacagtaccggcaagccggtcgcaactatgc

SEQ ID NO: 5072 - DNA, 80 bp, Artificial Sequence
  Description of Artificial Sequence: Synthetic oligonucleotide
tgtatgggccgcgctaagtctgtatgccgagcggttcagttatactgctaccctgggctgcaagccggtcgcaactatgc

SEQ ID NO: 5073 - DNA, 80 bp, Artificial Sequence
  Description of Artificial Sequence: Synthetic oligonucleotide
tgtatgggccgcgctaagtctgtatgccgagcggttcagtctgctctccagaaggctctgcaagccggtcgcaactatgc

SEQ ID NO: 5074 - DNA, 80 bp, Artificial Sequence
  Description of Artificial Sequence: Synthetic oligonucleotide
tgtatgggccgcgctaagtctgtatgccgagcggttcagtgctgtgactttggtgcctaccaagccggtcgcaactatgc

SEQ ID NO: 5075 - DNA, 80 bp, Artificial Sequence
  Description of Artificial Sequence: Synthetic oligonucleotide
tgtatgggccgcgctaagtctgtatgccgagcggttcagtaccacccctggcgtctttcccaagccggtcgcaactatgc

SEQ ID NO: 5076 - DNA, 80 bp, Artificial Sequence
  Description of Artificial Sequence: Synthetic oligonucleotide
tgtatgggccgcgctaagtctgtatgccgagcggttcagttggtcccatgtagcgtgccacaagccggtcgcaactatgc

SEQ ID NO: 5077 - DNA, 80 bp, Artificial Sequence
  Description of Artificial Sequence: Synthetic oligonucleotide
tgtatgggccgcgctaagtctgtatgccgagcggttcagtagcaagccagagcattttctcaagccggtcgcaactatgc

SEQ ID NO: 5078 - DNA, 80 bp, Artificial Sequence
  Description of Artificial Sequence: Synthetic oligonucleotide
tgtatgggccgcgctaagtctgtatgccgagcggttcagttggggtgtttagctagctgtcaagccggtcgcaactatgc

SEQ ID NO: 5079 - DNA, 80 bp, Artificial Sequence
  Description of Artificial Sequence: Synthetic oligonucleotide
tgtatgggccgcgctaagtctgtatgccgagcggttcagtacctatcacacagtcccagccaagccggtcgcaactatgc

SEQ ID NO: 5080 - DNA, 80 bp, Artificial Sequence
  Description of Artificial Sequence: Synthetic oligonucleotide
tgtatgggccgcgctaagtctgtatgccgagcggttcagttgaagactcacactgtgggccaagccggtcgcaactatgc

SEQ ID NO: 5081 - DNA, 80 bp, Artificial Sequence
  Description of Artificial Sequence: Synthetic oligonucleotide
tgtatgggccgcgctaagtctgtatgccgagcggttcagttggggaacagaggcgtaaatcaagccggtcgcaactatgc

SEQ ID NO: 5082 - DNA, 80 bp, Artificial Sequence
  Description of Artificial Sequence: Synthetic oligonucleotide
tgtatgggccgcgctaagtctgtatgccgagcggttcagtggtcccagatactccccactcaagccggtcgcaactatgc

SEQ ID NO: 5083 - DNA, 80 bp, Artificial Sequence
  Description of Artificial Sequence: Synthetic oligonucleotide
tgtatgggccgcgctaagtctgtatgccgagcggttcagtaagtggcagtggtgggaattcaagccggtcgcaactatgc

SEQ ID NO: 5084 - DNA, 80 bp, Artificial Sequence
  Description of Artificial Sequence: Synthetic oligonucleotide
tgtatgggccgcgctaagtctgtatgccgagcggttcagtgcatgcacgaccacgccaagcaagccggtcgcaactatgc

SEQ ID NO: 5085 - DNA, 80 bp, Artificial Sequence
  Description of Artificial Sequence: Synthetic oligonucleotide
tgtatgggccgcgctaagtctgtatgccgagcggttcagtgtggcctttagctgtgtgcccaagccggtcgcaactatgc

SEQ ID NO: 5086 - DNA, 80 bp, Artificial Sequence
  Description of Artificial Sequence: Synthetic oligonucleotide
tgtatgggccgcgctaagtctgtatgccgagcggttcagttctgaccctcgaagttgacacaagccggtcgcaactatgc

SEQ ID NO: 5087 - DNA, 80 bp, Artificial Sequence
  Description of Artificial Sequence: Synthetic oligonucleotide
tgtatgggccgcgctaagtctgtatgccgagcggttcagtacacaccaggtcatgagtcacaagccggtcgcaactatgc

SEQ ID NO: 5088 - DNA, 80 bp, Artificial Sequence
  Description of Artificial Sequence: Synthetic oligonucleotide
tgtatgggccgcgctaagtctgtatgccgagcggttcagtgtttgaagggctcctatggccaagccggtcgcaactatgc

SEQ ID NO: 5089 - DNA, 80 bp, Artificial Sequence
  Description of Artificial Sequence: Synthetic oligonucleotide
tgtatgggccgcgctaagtctgtatgccgagcggttcagtatggggagaaggtaccacatcaagccggtcgcaactatgc

SEQ ID NO: 5090 - DNA, 80 bp, Artificial Sequence
  Description of Artificial Sequence: Synthetic oligonucleotide
tgtatgggccgcgctaagtctgtatgccgagcggttcagtgagccctggacactctcagccaagccggtcgcaactatgc

SEQ ID NO: 5091 - DNA, 80 bp, Artificial Sequence
  Description of Artificial Sequence: Synthetic oligonucleotide
tgtatgggccgcgctaagtctgtatgccgagcggttcagttcaggaaggatctgatgggccaagccggtcgcaactatgc

SEQ ID NO: 5092 - DNA, 80 bp, Artificial Sequence
  Description of Artificial Sequence: Synthetic oligonucleotide
tgtatgggccgcgctaagtctgtatgccgagcggttcagtatctctcagtccccaatgctcaagccggtcgcaactatgc

SEQ ID NO: 5093 - DNA, 80 bp, Artificial Sequence
  Description of Artificial Sequence: Synthetic oligonucleotide
tgtatgggccgcgctaagtctgtatgccgagcggttcagtcccgctgctgatctaagtggcaagccggtcgcaactatgc

SEQ ID NO: 5094 - DNA, 80 bp, Artificial Sequence
  Description of Artificial Sequence: Synthetic oligonucleotide
tgtatgggccgcgctaagtctgtatgccgagcggttcagttccttggcccaacctgctctcaagccggtcgcaactatgc

SEQ ID NO: 5095 - DNA, 80 bp, Artificial Sequence
  Description of Artificial Sequence: Synthetic oligonucleotide
tgtatgggccgcgctaagtctgtatgccgagcggttcagtagagacagcctccaactcaccaagccggtcgcaactatgc

SEQ ID NO: 5096 - DNA, 80 bp, Artificial Sequence
  Description of Artificial Sequence: Synthetic oligonucleotide
tgtatgggccgcgctaagtctgtatgccgagcggttcagtacaagtgaaggtggccaaggcaagccggtcgcaactatgc

SEQ ID NO: 5097 - DNA, 80 bp, Artificial Sequence
  Description of Artificial Sequence: Synthetic oligonucleotide
tgtatgggccgcgctaagtctgtatgccgagcggttcagttcgagcagagaggagctgagcaagccggtcgcaactatgc

SEQ ID NO: 5098 - DNA, 80 bp, Artificial Sequence
  Description of Artificial Sequence: Synthetic oligonucleotide
tgtatgggccgcgctaagtctgtatgccgagcggttcagtgcaacccctatgcccttcctcaagccggtcgcaactatgc

SEQ ID NO: 5099 - DNA, 80 bp, Artificial Sequence
  Description of Artificial Sequence: Synthetic oligonucleotide
tgtatgggccgcgctaagtctgtatgccgagcggttcagtgtttctattggcccaggcagcaagccggtcgcaactatgc

SEQ ID NO: 5100 - DNA, 80 bp, Artificial Sequence
  Description of Artificial Sequence: Synthetic oligonucleotide
tgtatgggccgcgctaagtctgtatgccgagcggttcagtagtacctgtgccttgctggacaagccggtcgcaactatgc

SEQ ID NO: 5101 - DNA, 80 bp, Artificial Sequence
  Description of Artificial Sequence: Synthetic oligonucleotide
tgtatgggccgcgctaagtctgtatgccgagcggttcagtgagcctagcccaatgtgcggcaagccggtcgcaactatgc

SEQ ID NO: 5102 - DNA, 80 bp, Artificial Sequence
  Description of Artificial Sequence: Synthetic oligonucleotide
tgtatgggccgcgctaagtctgtatgccgagcggttcagtgggtagccacaagaactgggcaagccggtcgcaactatgc

SEQ ID NO: 5103 - DNA, 80 bp, Artificial Sequence
  Description of Artificial Sequence: Synthetic oligonucleotide
tgtatgggccgcgctaagtctgtatgccgagcggttcagttggactggactggtagcatgcaagccggtcgcaactatgc

SEQ ID NO: 5104 - DNA, 80 bp, Artificial Sequence
  Description of Artificial Sequence: Synthetic oligonucleotide
tgtatgggccgcgctaagtctgtatgccgagcggttcagtagaggaggtgaactcggtgacaagccggtcgcaactatgc

SEQ ID NO: 5105 - DNA, 80 bp, Artificial Sequence
  Description of Artificial Sequence: Synthetic oligonucleotide
tgtatgggccgcgctaagtctgtatgccgagcggttcagtgctggaaaaggtcaaaccctcaagccggtcgcaactatgc

SEQ ID NO: 5106 - DNA, 80 bp, Artificial Sequence
  Description of Artificial Sequence: Synthetic oligonucleotide
tgtatgggccgcgctaagtctgtatgccgagcggttcagtgagaaccatccaacatgccacaagccggtcgcaactatgc

SEQ ID NO: 5107 - DNA, 80 bp, Artificial Sequence
  Description of Artificial Sequence: Synthetic oligonucleotide
tgtatgggccgcgctaagtctgtatgccgagcggttcagttagcccattagccactgacccaagccggtcgcaactatgc

SEQ ID NO: 5108 - DNA, 80 bp, Artificial Sequence
  Description of Artificial Sequence: Synthetic oligonucleotide
tgtatgggccgcgctaagtctgtatgccgagcggttcagtaaaagccaaggtctccatgccaagccggtcgcaactatgc

SEQ ID NO: 5109 - DNA, 80 bp, Artificial Sequence
  Description of Artificial Sequence: Synthetic oligonucleotide
tgtatgggccgcgctaagtctgtatgccgagcggttcagtacatcacccatgtatccccgcaagccggtcgcaactatgc

SEQ ID NO: 5110 - DNA, 80 bp, Artificial Sequence
  Description of Artificial Sequence: Synthetic oligonucleotide
tgtatgggccgcgctaagtctgtatgccgagcggttcagtcgtctgacgtgggaactctgcaagccggtcgcaactatgc

SEQ ID NO: 5111 - DNA, 80 bp, Artificial Sequence
  Description of Artificial Sequence: Synthetic oligonucleotide
tgtatgggccgcgctaagtctgtatgccgagcggttcagtcaggttgaagtccagctgtgcaagccggtcgcaactatgc

SEQ ID NO: 5112 - DNA, 80 bp, Artificial Sequence
  Description of Artificial Sequence: Synthetic oligonucleotide
tgtatgggccgcgctaagtctgtatgccgagcggttcagtgtggctccctggaccatatgcaagccggtcgcaactatgc

SEQ ID NO: 5113 - DNA, 80 bp, Artificial Sequence
  Description of Artificial Sequence: Synthetic oligonucleotide
tgtatgggccgcgctaagtctgtatgccgagcggttcagtccagtgcacatccatggaagcaagccggtcgcaactatgc

SEQ ID NO: 5114 - DNA, 80 bp, Artificial Sequence
  Description of Artificial Sequence: Synthetic oligonucleotide
tgtatgggccgcgctaagtctgtatgccgagcggttcagtttctggagctagcacgaagacaagccggtcgcaactatgc

SEQ ID NO: 5115 - DNA, 80 bp, Artificial Sequence
  Description of Artificial Sequence: Synthetic oligonucleotide
tgtatgggccgcgctaagtctgtatgccgagcggttcagtttgacctggctcactactgccaagccggtcgcaactatgc

SEQ ID NO: 5116 - DNA, 80 bp, Artificial Sequence
  Description of Artificial Sequence: Synthetic oligonucleotide
tgtatgggccgcgctaagtcagccggttcgtcaagtagcataaactgggcaggtagggcccaagccggtcgcaactatgc

SEQ ID NO: 5117 - DNA, 80 bp, Artificial Sequence
  Description of Artificial Sequence: Synthetic oligonucleotide
tgtatgggccgcgctaagtcagccggttcgtcaagtagcaaggggcagggaactttcctgcaagccggtcgcaactatgc

SEQ ID NO: 5118 - DNA, 80 bp, Artificial Sequence
  Description of Artificial Sequence: Synthetic oligonucleotide
tgtatgggccgcgctaagtcagccggttcgtcaagtagcattgtgaggcactttgcatcccaagccggtcgcaactatgc

SEQ ID NO: 5119 - DNA, 80 bp, Artificial Sequence
  Description of Artificial Sequence: Synthetic oligonucleotide
tgtatgggccgcgctaagtcagccggttcgtcaagtagcatcgcatgtcctcttagtccacaagccggtcgcaactatgc

SEQ ID NO: 5120 - DNA, 80 bp, Artificial Sequence
  Description of Artificial Sequence: Synthetic oligonucleotide
tgtatgggccgcgctaagtcagccggttcgtcaagtagcatctaaatgcccacacgtcgtcaagccggtcgcaactatgc

SEQ ID NO: 5121 - DNA, 80 bp, Artificial Sequence
  Description of Artificial Sequence: Synthetic oligonucleotide
tgtatgggccgcgctaagtcagccggttcgtcaagtagcaccctaggggagagttttggacaagccggtcgcaactatgc

SEQ ID NO: 5122 - DNA, 80 bp, Artificial Sequence
  Description of Artificial Sequence: Synthetic oligonucleotide
tgtatgggccgcgctaagtcagccggttcgtcaagtagcaagaggttcattcgcctacctcaagccggtcgcaactatgc

SEQ ID NO: 5123 - DNA, 80 bp, Artificial Sequence
  Description of Artificial Sequence: Synthetic oligonucleotide
tgtatgggccgcgctaagtcagccggttcgtcaagtagcagctgtttgaactctagggcccaagccggtcgcaactatgc

SEQ ID NO: 5124 - DNA, 80 bp, Artificial Sequence
  Description of Artificial Sequence: Synthetic oligonucleotide
tgtatgggccgcgctaagtcagccggttcgtcaagtagcacacacatacggattgcagcacaagccggtcgcaactatgc

SEQ ID NO: 5125 - DNA, 80 bp, Artificial Sequence
  Description of Artificial Sequence: Synthetic oligonucleotide
tgtatgggccgcgctaagtcagccggttcgtcaagtagcaagcaatagtgtggcctgttgcaagccggtcgcaactatgc

SEQ ID NO: 5126 - DNA, 80 bp, Artificial Sequence
  Description of Artificial Sequence: Synthetic oligonucleotide
tgtatgggccgcgctaagtcagccggttcgtcaagtagcaagacagccaggacttgtactcaagccggtcgcaactatgc

SEQ ID NO: 5127 - DNA, 80 bp, Artificial Sequence
  Description of Artificial Sequence: Synthetic oligonucleotide
tgtatgggccgcgctaagtcagccggttcgtcaagtagcatgcactcgtggatgcagcttcaagccggtcgcaactatgc

SEQ ID NO: 5128 - DNA, 80 bp, Artificial Sequence
  Description of Artificial Sequence: Synthetic oligonucleotide
tgtatgggccgcgctaagtcagccggttcgtcaagtagcaatgcttagagggaggcaggtcaagccggtcgcaactatgc

SEQ ID NO: 5129 - DNA, 80 bp, Artificial Sequence
  Description of Artificial Sequence: Synthetic oligonucleotide
tgtatgggccgcgctaagtcagccggttcgtcaagtagcatccaatgcctgatgactcctcaagccggtcgcaactatgc

SEQ ID NO: 5130 - DNA, 80 bp, Artificial Sequence
  Description of Artificial Sequence: Synthetic oligonucleotide
tgtatgggccgcgctaagtcagccggttcgtcaagtagcagatttggcactggagcatcccaagccggtcgcaactatgc

SEQ ID NO: 5131 - DNA, 80 bp, Artificial Sequence
  Description of Artificial Sequence: Synthetic oligonucleotide
tgtatgggccgcgctaagtcagccggttcgtcaagtagcaccttggcctctaactctcctcaagccggtcgcaactatgc

SEQ ID NO: 5132 - DNA, 80 bp, Artificial Sequence
  Description of Artificial Sequence: Synthetic oligonucleotide
tgtatgggccgcgctaagtcagccggttcgtcaagtagcaagcaccacacatccatagctcaagccggtcgcaactatgc

SEQ ID NO: 5133 - DNA, 80 bp, Artificial Sequence
  Description of Artificial Sequence: Synthetic oligonucleotide
tgtatgggccgcgctaagtcagccggttcgtcaagtagcaactacagcctttccagtgcccaagccggtcgcaactatgc

SEQ ID NO: 5134 - DNA, 80 bp, Artificial Sequence
  Description of Artificial Sequence: Synthetic oligonucleotide
tgtatgggccgcgctaagtcagccggttcgtcaagtagcaacggaaatgtcgagctgagacaagccggtcgcaactatgc

SEQ ID NO: 5135 - DNA, 80 bp, Artificial Sequence
  Description of Artificial Sequence: Synthetic oligonucleotide
tgtatgggccgcgctaagtcagccggttcgtcaagtagcacatgtgaggctggcatgtaccaagccggtcgcaactatgc

SEQ ID NO: 5136 - DNA, 80 bp, Artificial Sequence
  Description of Artificial Sequence: Synthetic oligonucleotide
tgtatgggccgcgctaagtcagccggttcgtcaagtagcatgccagatgagctgtagtgccaagccggtcgcaactatgc

SEQ ID NO: 5137 - DNA, 80 bp, Artificial Sequence
  Description of Artificial Sequence: Synthetic oligonucleotide
tgtatgggccgcgctaagtcagccggttcgtcaagtagcaagctcgtgttctcctcctttcaagccggtcgcaactatgc

SEQ ID NO: 5138 - DNA, 80 bp, Artificial Sequence
  Description of Artificial Sequence: Synthetic oligonucleotide
tgtatgggccgcgctaagtcagccggttcgtcaagtagcattccagctctacatggaccccaagccggtcgcaactatgc

SEQ ID NO: 5139 - DNA, 80 bp, Artificial Sequence
  Description of Artificial Sequence: Synthetic oligonucleotide
tgtatgggccgcgctaagtcagccggttcgtcaagtagcatttgacaggcctaggtgagtcaagccggtcgcaactatgc

SEQ ID NO: 5140 - DNA, 80 bp, Artificial Sequence
  Description of Artificial Sequence: Synthetic oligonucleotide
tgtatgggccgcgctaagtcagccggttcgtcaagtagcaaggggaaccataactgaggtcaagccggtcgcaactatgc

SEQ ID NO: 5141 - DNA, 80 bp, Artificial Sequence
  Description of Artificial Sequence: Synthetic oligonucleotide
tgtatgggccgcgctaagtcagccggttcgtcaagtagcaggaacaagctggttcagaggcaagccggtcgcaactatgc

SEQ ID NO: 5142 - DNA, 80 bp, Artificial Sequence
  Description of Artificial Sequence: Synthetic oligonucleotide
tgtatgggccgcgctaagtcagccggttcgtcaagtagcaagccctaggattctctggcgcaagccggtcgcaactatgc

SEQ ID NO: 5143 - DNA, 80 bp, Artificial Sequence
  Description of Artificial Sequence: Synthetic oligonucleotide
tgtatgggccgcgctaagtcagccggttcgtcaagtagcaacctgcatgtcaaccactctcaagccggtcgcaactatgc

SEQ ID NO: 5144 - DNA, 80 bp, Artificial Sequence
  Description of Artificial Sequence: Synthetic oligonucleotide
tgtatgggccgcgctaagtcagccggttcgtcaagtagcacccctcaggagcgcaaaggacaagccggtcgcaactatgc

SEQ ID NO: 5145 - DNA, 80 bp, Artificial Sequence
  Description of Artificial Sequence: Synthetic oligonucleotide
tgtatgggccgcgctaagtcagccggttcgtcaagtagcaacggggagagactgcatgaacaagccggtcgcaactatgc

SEQ ID NO: 5146 - DNA, 80 bp, Artificial Sequence
  Description of Artificial Sequence: Synthetic oligonucleotide
tgtatgggccgcgctaagtcagccggttcgtcaagtagcaatcagtacaccgcctttggacaagccggtcgcaactatgc

SEQ ID NO: 5147 - DNA, 80 bp, Artificial Sequence
  Description of Artificial Sequence: Synthetic oligonucleotide
tgtatgggccgcgctaagtcagccggttcgtcaagtagcaacctggtagggaagagaggacaagccggtcgcaactatgc

SEQ ID NO: 5148 - DNA, 80 bp, Artificial Sequence
  Description of Artificial Sequence: Synthetic oligonucleotide
tgtatgggccgcgctaagtcagccggttcgtcaagtagcatcttccagacagggatgaggcaagccggtcgcaactatgc

SEQ ID NO: 5149 - DNA, 80 bp, Artificial Sequence
  Description of Artificial Sequence: Synthetic oligonucleotide
tgtatgggccgcgctaagtcagccggttcgtcaagtagcaaccctcatctaaggccactccaagccggtcgcaactatgc

SEQ ID NO: 5150 - DNA, 80 bp, Artificial Sequence
  Description of Artificial Sequence: Synthetic oligonucleotide
tgtatgggccgcgctaagtcagccggttcgtcaagtagcacttggcaaagcagcactccccaagccggtcgcaactatgc

SEQ ID NO: 5151 - DNA, 80 bp, Artificial Sequence
  Description of Artificial Sequence: Synthetic oligonucleotide
tgtatgggccgcgctaagtcagccggttcgtcaagtagcactccctaggtgagccacatgcaagccggtcgcaactatgc

SEQ ID NO: 5152 - DNA, 80 bp, Artificial Sequence
  Description of Artificial Sequence: Synthetic oligonucleotide
tgtatgggccgcgctaagtcagccggttcgtcaagtagcactggaatgttgcccaccaatcaagccggtcgcaactatgc

SEQ ID NO: 5153 - DNA, 80 bp, Artificial Sequence
  Description of Artificial Sequence: Synthetic oligonucleotide
tgtatgggccgcgctaagtcagccggttcgtcaagtagcattcagactacatggctgccacaagccggtcgcaactatgc

SEQ ID NO: 5154 - DNA, 80 bp, Artificial Sequence
  Description of Artificial Sequence: Synthetic oligonucleotide
tgtatgggccgcgctaagtcagccggttcgtcaagtagcattaatggaggccagagcagtcaagccggtcgcaactatgc

SEQ ID NO: 5155 - DNA, 80 bp, Artificial Sequence
  Description of Artificial Sequence: Synthetic oligonucleotide
tgtatgggccgcgctaagtcagccggttcgtcaagtagcatgtgggtagagcactcatggcaagccggtcgcaactatgc

SEQ ID NO: 5156 - DNA, 80 bp, Artificial Sequence
  Description of Artificial Sequence: Synthetic oligonucleotide
tgtatgggccgcgctaagtcagccggttcgtcaagtagcacacaatgagctgcagacctgcaagccggtcgcaactatgc

SEQ ID NO: 5157 - DNA, 80 bp, Artificial Sequence
  Description of Artificial Sequence: Synthetic oligonucleotide
tgtatgggccgcgctaagtcagccggttcgtcaagtagcatggggcacaaggctcaaagtcaagccggtcgcaactatgc

SEQ ID NO: 5158 - DNA, 80 bp, Artificial Sequence
  Description of Artificial Sequence: Synthetic oligonucleotide
tgtatgggccgcgctaagtcagccggttcgtcaagtagcagttgcacaaagaaggaggctcaagccggtcgcaactatgc

SEQ ID NO: 5159 - DNA, 80 bp, Artificial Sequence
  Description of Artificial Sequence: Synthetic oligonucleotide
tgtatgggccgcgctaagtcagccggttcgtcaagtagcatccctcacatcacctcacttcaagccggtcgcaactatgc

SEQ ID NO: 5160 - DNA, 80 bp, Artificial Sequence
  Description of Artificial Sequence: Synthetic oligonucleotide
tgtatgggccgcgctaagtcagccggttcgtcaagtagcaaccagagacacttacagcctcaagccggtcgcaactatgc

SEQ ID NO: 5161 - DNA, 80 bp, Artificial Sequence
  Description of Artificial Sequence: Synthetic oligonucleotide
tgtatgggccgcgctaagtcagccggttcgtcaagtagcataggagccagcaaggtgggacaagccggtcgcaactatgc

SEQ ID NO: 5162 - DNA, 80 bp, Artificial Sequence
  Description of Artificial Sequence: Synthetic oligonucleotide
tgtatgggccgcgctaagtcagccggttcgtcaagtagcaagggaactcgtccaggcaggcaagccggtcgcaactatgc

SEQ ID NO: 5163 - DNA, 80 bp, Artificial Sequence
  Description of Artificial Sequence: Synthetic oligonucleotide
tgtatgggccgcgctaagtcagccggttcgtcaagtagcaacttgaggcctcaaagctgacaagccggtcgcaactatgc

SEQ ID NO: 5164 - DNA, 80 bp, Artificial Sequence
  Description of Artificial Sequence: Synthetic oligonucleotide
tgtatgggccgcgctaagtcagccggttcgtcaagtagcatttggtgtacattgagcccccaagccggtcgcaactatgc

SEQ ID NO: 5165 - DNA, 80 bp, Artificial Sequence
  Description of Artificial Sequence: Synthetic oligonucleotide
tgtatgggccgcgctaagtcagccggttcgtcaagtagcagcttcccagacagaccgtatcaagccggtcgcaactatgc

SEQ ID NO: 5166 - DNA, 80 bp, Artificial Sequence
  Description of Artificial Sequence: Synthetic oligonucleotide
tgtatgggccgcgctaagtcagccggttcgtcaagtagcatctttcaggtgccagagacacaagccggtcgcaactatgc

SEQ ID NO: 5167 - DNA, 80 bp, Artificial Sequence
  Description of Artificial Sequence: Synthetic oligonucleotide
tgtatgggccgcgctaagtcagccggttcgtcaagtagcatcttcaggaacctggaccttcaagccggtcgcaactatgc

SEQ ID NO: 5168 - DNA, 80 bp, Artificial Sequence
  Description of Artificial Sequence: Synthetic oligonucleotide
tgtatgggccgcgctaagtcagccggttcgtcaagtagcactgggcccagaactaccaaccaagccggtcgcaactatgc

SEQ ID NO: 5169 - DNA, 80 bp, Artificial Sequence
  Description of Artificial Sequence: Synthetic oligonucleotide
tgtatgggccgcgctaagtcagccggttcgtcaagtagcattcttcccctggacccaaagcaagccggtcgcaactatgc

SEQ ID NO: 5170 - DNA, 80 bp, Artificial Sequence
  Description of Artificial Sequence: Synthetic oligonucleotide
tgtatgggccgcgctaagtcagccggttcgtcaagtagcaaccgaaactcactcaaaggccaagccggtcgcaactatgc

SEQ ID NO: 5171 - DNA, 80 bp, Artificial Sequence
  Description of Artificial Sequence: Synthetic oligonucleotide
tgtatgggccgcgctaagtcagccggttcgtcaagtagcacggctgccgagttgagaaggcaagccggtcgcaactatgc

SEQ ID NO: 5172 - DNA, 80 bp, Artificial Sequence
  Description of Artificial Sequence: Synthetic oligonucleotide
tgtatgggccgcgctaagtcagccggttcgtcaagtagcacctcatggatgccttcacctcaagccggtcgcaactatgc

SEQ ID NO: 5173 - DNA, 80 bp, Artificial Sequence
  Description of Artificial Sequence: Synthetic oligonucleotide
tgtatgggccgcgctaagtcagccggttcgtcaagtagcaggatagctgtgggactccagcaagccggtcgcaactatgc

SEQ ID NO: 5174 - DNA, 80 bp, Artificial Sequence
  Description of Artificial Sequence: Synthetic oligonucleotide
tgtatgggccgcgctaagtcagccggttcgtcaagtagcatgtcatagcacgaaactggccaagccggtcgcaactatgc

SEQ ID NO: 5175 - DNA, 80 bp, Artificial Sequence
  Description of Artificial Sequence: Synthetic oligonucleotide
tgtatgggccgcgctaagtcagccggttcgtcaagtagcagcccctccatggacatcattcaagccggtcgcaactatgc

SEQ ID NO: 5176 - DNA, 80 bp, Artificial Sequence
  Description of Artificial Sequence: Synthetic oligonucleotide
tgtatgggccgcgctaagtcagccggttcgtcaagtagcattagactccaacaccccacacaagccggtcgcaactatgc

SEQ ID NO: 5177 - DNA, 80 bp, Artificial Sequence
  Description of Artificial Sequence: Synthetic oligonucleotide
tgtatgggccgcgctaagtcagccggttcgtcaagtagcatctgagctccctggcatatgcaagccggtcgcaactatgc

SEQ ID NO: 5178 - DNA, 80 bp, Artificial Sequence
  Description of Artificial Sequence: Synthetic oligonucleotide
tgtatgggccgcgctaagtcagccggttcgtcaagtagcactgcggtgtccagaatttcccaagccggtcgcaactatgc

SEQ ID NO: 5179 - DNA, 80 bp, Artificial Sequence
  Description of Artificial Sequence: Synthetic oligonucleotide
tgtatgggccgcgctaagtcagccggttcgtcaagtagcagggtggcgacgaggagtagacaagccggtcgcaactatgc

SEQ ID NO: 5180 - DNA, 80 bp, Artificial Sequence
  Description of Artificial Sequence: Synthetic oligonucleotide
tgtatgggccgcgctaagtcagccggttcgtcaagtagcatggggtgcagaataaggaggcaagccggtcgcaactatgc

SEQ ID NO: 5181 - DNA, 80 bp, Artificial Sequence
  Description of Artificial Sequence: Synthetic oligonucleotide
tgtatgggccgcgctaagtcagccggttcgtcaagtagcaacccaagctatgtctcggcacaagccggtcgcaactatgc

SEQ ID NO: 5182 - DNA, 80 bp, Artificial Sequence
  Description of Artificial Sequence: Synthetic oligonucleotide
tgtatgggccgcgctaagtcagccggttcgtcaagtagcatggggtgtgatctttccacgcaagccggtcgcaactatgc

SEQ ID NO: 5183 - DNA, 80 bp, Artificial Sequence
  Description of Artificial Sequence: Synthetic oligonucleotide
tgtatgggccgcgctaagtcagccggttcgtcaagtagcaaaatgagcaagaagggtgggcaagccggtcgcaactatgc

SEQ ID NO: 5184 - DNA, 80 bp, Artificial Sequence
  Description of Artificial Sequence: Synthetic oligonucleotide
tgtatgggccgcgctaagtcagccggttcgtcaagtagcattgtgctggactgctcaagacaagccggtcgcaactatgc

SEQ ID NO: 5185 - DNA, 80 bp, Artificial Sequence
  Description of Artificial Sequence: Synthetic oligonucleotide
tgtatgggccgcgctaagtcagccggttcgtcaagtagcagcacctatctggatgccaaccaagccggtcgcaactatgc

SEQ ID NO: 5186 - DNA, 80 bp, Artificial Sequence
  Description of Artificial Sequence: Synthetic oligonucleotide
tgtatgggccgcgctaagtcagccggttcgtcaagtagcaaaacaccggtctctggtcaccaagccggtcgcaactatgc

SEQ ID NO: 5187 - DNA, 80 bp, Artificial Sequence
  Description of Artificial Sequence: Synthetic oligonucleotide
tgtatgggccgcgctaagtcagccggttcgtcaagtagcatcgtggctctgtcttcttcacaagccggtcgcaactatgc

SEQ ID NO: 5188 - DNA, 80 bp, Artificial Sequence
  Description of Artificial Sequence: Synthetic oligonucleotide
tgtatgggccgcgctaagtcagccggttcgtcaagtagcacttgggaggccatcatgtgacaagccggtcgcaactatgc

SEQ ID NO: 5189 - DNA, 80 bp, Artificial Sequence
  Description of Artificial Sequence: Synthetic oligonucleotide
tgtatgggccgcgctaagtcagccggttcgtcaagtagcaacatcttataccgctgggcacaagccggtcgcaactatgc

SEQ ID NO: 5190 - DNA, 80 bp, Artificial Sequence
  Description of Artificial Sequence: Synthetic oligonucleotide
tgtatgggccgcgctaagtcagccggttcgtcaagtagcacagggctctgcaatagctggcaagccggtcgcaactatgc

SEQ ID NO: 5191 - DNA, 80 bp, Artificial Sequence
  Description of Artificial Sequence: Synthetic oligonucleotide
tgtatgggccgcgctaagtcagccggttcgtcaagtagcagccaaagttcaccatcctcccaagccggtcgcaactatgc

SEQ ID NO: 5192 - DNA, 80 bp, Artificial Sequence
  Description of Artificial Sequence: Synthetic oligonucleotide
tgtatgggccgcgctaagtcagccggttcgtcaagtagcactgctttggcacagttgagtcaagccggtcgcaactatgc

SEQ ID NO: 5193 - DNA, 80 bp, Artificial Sequence
  Description of Artificial Sequence: Synthetic oligonucleotide
tgtatgggccgcgctaagtcagccggttcgtcaagtagcaagcatctcaactgccccaatcaagccggtcgcaactatgc

SEQ ID NO: 5194 - DNA, 80 bp, Artificial Sequence
  Description of Artificial Sequence: Synthetic oligonucleotide
tgtatgggccgcgctaagtcagccggttcgtcaagtagcatactccatccccaagcatctcaagccggtcgcaactatgc

SEQ ID NO: 5195 - DNA, 80 bp, Artificial Sequence
  Description of Artificial Sequence: Synthetic oligonucleotide
tgtatgggccgcgctaagtctgtatgccgagcggttcagtttctggcaccaacaacactgcaagccggtcgcaactatgc

SEQ ID NO: 5196 - DNA, 80 bp, Artificial Sequence
  Description of Artificial Sequence: Synthetic oligonucleotide
tgtatgggccgcgctaagtctgtatgccgagcggttcagtgtccccgcggcagagcagttcaagccggtcgcaactatgc

SEQ ID NO: 5197 - DNA, 80 bp, Artificial Sequence
  Description of Artificial Sequence: Synthetic oligonucleotide
tgtatgggccgcgctaagtctgtatgccgagcggttcagtgcgcagccttggcagtgcagcaagccggtcgcaactatgc

SEQ ID NO: 5198 - DNA, 80 bp, Artificial Sequence
  Description of Artificial Sequence: Synthetic oligonucleotide
tgtatgggccgcgctaagtctgtatgccgagcggttcagttttctggtcggcttcagcgtcaagccggtcgcaactatgc

SEQ ID NO: 5199 - DNA, 80 bp, Artificial Sequence
  Description of Artificial Sequence: Synthetic oligonucleotide
tgtatgggccgcgctaagtctgtatgccgagcggttcagtggcctctcgcatatgtgtggcaagccggtcgcaactatgc

SEQ ID NO: 5200 - DNA, 80 bp, Artificial Sequence
  Description of Artificial Sequence: Synthetic oligonucleotide
tgtatgggccgcgctaagtctgtatgccgagcggttcagtttgtgttctgctggtgatggcaagccggtcgcaactatgc

SEQ ID NO: 5201 - DNA, 80 bp, Artificial Sequence
  Description of Artificial Sequence: Synthetic oligonucleotide
tgtatgggccgcgctaagtctgtatgccgagcggttcagtgtcccaaaagtacaccaggccaagccggtcgcaactatgc

SEQ ID NO: 5202 - DNA, 80 bp, Artificial Sequence
  Description of Artificial Sequence: Synthetic oligonucleotide
tgtatgggccgcgctaagtctgtatgccgagcggttcagtttcttccgcaggatgtggcacaagccggtcgcaactatgc

SEQ ID NO: 5203 - DNA, 80 bp, Artificial Sequence
  Description of Artificial Sequence: Synthetic oligonucleotide
tgtatgggccgcgctaagtctgtatgccgagcggttcagttggttgggaatacctgtcctcaagccggtcgcaactatgc

SEQ ID NO: 5204 - DNA, 80 bp, Artificial Sequence
  Description of Artificial Sequence: Synthetic oligonucleotide
tgtatgggccgcgctaagtctgtatgccgagcggttcagttgtgtcattgacttggtgcccaagccggtcgcaactatgc

SEQ ID NO: 5205 - DNA, 80 bp, Artificial Sequence
  Description of Artificial Sequence: Synthetic oligonucleotide
tgtatgggccgcgctaagtctgtatgccgagcggttcagtatgcccctgaattccaagctcaagccggtcgcaactatgc

SEQ ID NO: 5206 - DNA, 80 bp, Artificial Sequence
  Description of Artificial Sequence: Synthetic oligonucleotide
tgtatgggccgcgctaagtctgtatgccgagcggttcagttgagtctgaggtgcatagcacaagccggtcgcaactatgc

SEQ ID NO: 5207 - DNA, 80 bp, Artificial Sequence
  Description of Artificial Sequence: Synthetic oligonucleotide
tgtatgggccgcgctaagtctgtatgccgagcggttcagttaccctttgcacaaacctggcaagccggtcgcaactatgc

SEQ ID NO: 5208 - DNA, 80 bp, Artificial Sequence
  Description of Artificial Sequence: Synthetic oligonucleotide
tgtatgggccgcgctaagtctgtatgccgagcggttcagtgggaaccccagggacaactgcaagccggtcgcaactatgc

SEQ ID NO: 5209 - DNA, 80 bp, Artificial Sequence
  Description of Artificial Sequence: Synthetic oligonucleotide
tgtatgggccgcgctaagtctgtatgccgagcggttcagttgtagtgacgtggcagacatcaagccggtcgcaactatgc

SEQ ID NO: 5210 - DNA, 80 bp, Artificial Sequence
  Description of Artificial Sequence: Synthetic oligonucleotide
tgtatgggccgcgctaagtctgtatgccgagcggttcagtaagaagatgctgcattgccccaagccggtcgcaactatgc

SEQ ID NO: 5211 - DNA, 80 bp, Artificial Sequence
  Description of Artificial Sequence: Synthetic oligonucleotide
tgtatgggccgcgctaagtctgtatgccgagcggttcagtacaacgacgctagttctgggcaagccggtcgcaactatgc

SEQ ID NO: 5212 - DNA, 80 bp, Artificial Sequence
  Description of Artificial Sequence: Synthetic oligonucleotide
tgtatgggccgcgctaagtctgtatgccgagcggttcagttggctggtagtattgtgggacaagccggtcgcaactatgc

SEQ ID NO: 5213 - DNA, 80 bp, Artificial Sequence
  Description of Artificial Sequence: Synthetic oligonucleotide
tgtatgggccgcgctaagtctgtatgccgagcggttcagtacttcacactccaggtagctcaagccggtcgcaactatgc

SEQ ID NO: 5214 - DNA, 80 bp, Artificial Sequence
  Description of Artificial Sequence: Synthetic oligonucleotide
tgtatgggccgcgctaagtctgtatgccgagcggttcagtctgagcttgagcattctggccaagccggtcgcaactatgc

SEQ ID NO: 5215 - DNA, 80 bp, Artificial Sequence
  Description of Artificial Sequence: Synthetic oligonucleotide
tgtatgggccgcgctaagtctgtatgccgagcggttcagttaggaaactgccggtgttcccaagccggtcgcaactatgc

SEQ ID NO: 5216 - DNA, 80 bp, Artificial Sequence
  Description of Artificial Sequence: Synthetic oligonucleotide
tgtatgggccgcgctaagtctgtatgccgagcggttcagtcctttgattggctgccgtaccaagccggtcgcaactatgc

SEQ ID NO: 5217 - DNA, 80 bp, Artificial Sequence
  Description of Artificial Sequence: Synthetic oligonucleotide
tgtatgggccgcgctaagtctgtatgccgagcggttcagtctgcgctctaagtggccaatcaagccggtcgcaactatgc

SEQ ID NO: 5218 - DNA, 80 bp, Artificial Sequence
  Description of Artificial Sequence: Synthetic oligonucleotide
tgtatgggccgcgctaagtctgtatgccgagcggttcagtataatgaggcatccgcaggccaagccggtcgcaactatgc

SEQ ID NO: 5219 - DNA, 80 bp, Artificial Sequence
  Description of Artificial Sequence: Synthetic oligonucleotide
tgtatgggccgcgctaagtctgtatgccgagcggttcagtacccaagcactgatcacagccaagccggtcgcaactatgc

SEQ ID NO: 5220 - DNA, 80 bp, Artificial Sequence
  Description of Artificial Sequence: Synthetic oligonucleotide
tgtatgggccgcgctaagtctgtatgccgagcggttcagttatcagtaggcaggtgctggcaagccggtcgcaactatgc

SEQ ID NO: 5221 - DNA, 80 bp, Artificial Sequence
  Description of Artificial Sequence: Synthetic oligonucleotide
tgtatgggccgcgctaagtctgtatgccgagcggttcagtacaaccatgccctttggaatcaagccggtcgcaactatgc

SEQ ID NO: 5222 - DNA, 80 bp, Artificial Sequence
  Description of Artificial Sequence: Synthetic oligonucleotide
tgtatgggccgcgctaagtctgtatgccgagcggttcagtcccaaacgacagaaaggcagcaagccggtcgcaactatgc

SEQ ID NO: 5223 - DNA, 80 bp, Artificial Sequence
  Description of Artificial Sequence: Synthetic oligonucleotide
tgtatgggccgcgctaagtctgtatgccgagcggttcagttaaagggtcctcgcagaactcaagccggtcgcaactatgc

SEQ ID NO: 5224 - DNA, 80 bp, Artificial Sequence
  Description of Artificial Sequence: Synthetic oligonucleotide
tgtatgggccgcgctaagtctgtatgccgagcggttcagttctgtgaccaactcatgggacaagccggtcgcaactatgc

SEQ ID NO: 5225 - DNA, 80 bp, Artificial Sequence
  Description of Artificial Sequence: Synthetic oligonucleotide
tgtatgggccgcgctaagtctgtatgccgagcggttcagtatcccagtgaagccaatccacaagccggtcgcaactatgc

SEQ ID NO: 5226 - DNA, 80 bp, Artificial Sequence
  Description of Artificial Sequence: Synthetic oligonucleotide
tgtatgggccgcgctaagtctgtatgccgagcggttcagtagtacctcactaaggggcagcaagccggtcgcaactatgc

SEQ ID NO: 5227 - DNA, 80 bp, Artificial Sequence
  Description of Artificial Sequence: Synthetic oligonucleotide
tgtatgggccgcgctaagtctgtatgccgagcggttcagtaacaaccatgagagtggggacaagccggtcgcaactatgc

SEQ ID NO: 5228 - DNA, 80 bp, Artificial Sequence
  Description of Artificial Sequence: Synthetic oligonucleotide
tgtatgggccgcgctaagtctgtatgccgagcggttcagtcaggcacgaataacccgagtcaagccggtcgcaactatgc

SEQ ID NO: 5229 - DNA, 80 bp, Artificial Sequence
  Description of Artificial Sequence: Synthetic oligonucleotide
tgtatgggccgcgctaagtctgtatgccgagcggttcagtcctggaggactcatgtcactcaagccggtcgcaactatgc

SEQ ID NO: 5230 - DNA, 80 bp, Artificial Sequence
  Description of Artificial Sequence: Synthetic oligonucleotide
tgtatgggccgcgctaagtctgtatgccgagcggttcagtgctcctaggccctatatgcccaagccggtcgcaactatgc

SEQ ID NO: 5231 - DNA, 80 bp, Artificial Sequence
  Description of Artificial Sequence: Synthetic oligonucleotide
tgtatgggccgcgctaagtctgtatgccgagcggttcagttgtcaggtctatgggaggtgcaagccggtcgcaactatgc

SEQ ID NO: 5232 - DNA, 80 bp, Artificial Sequence
  Description of Artificial Sequence: Synthetic oligonucleotide
tgtatgggccgcgctaagtctgtatgccgagcggttcagtccacattacaggaccctccacaagccggtcgcaactatgc

SEQ ID NO: 5233 - DNA, 80 bp, Artificial Sequence
  Description of Artificial Sequence: Synthetic oligonucleotide
tgtatgggccgcgctaagtctgtatgccgagcggttcagtaggggaacgagtagaaagcacaagccggtcgcaactatgc

SEQ ID NO: 5234 - DNA, 80 bp, Artificial Sequence
  Description of Artificial Sequence: Synthetic oligonucleotide
tgtatgggccgcgctaagtctgtatgccgagcggttcagtactctaaagagggagggcagcaagccggtcgcaactatgc

SEQ ID NO: 5235 - DNA, 80 bp, Artificial Sequence
  Description of Artificial Sequence: Synthetic oligonucleotide
tgtatgggccgcgctaagtctgtatgccgagcggttcagtatgagaggagcacagtcccacaagccggtcgcaactatgc

SEQ ID NO: 5236 - DNA, 80 bp, Artificial Sequence
  Description of Artificial Sequence: Synthetic oligonucleotide
tgtatgggccgcgctaagtctgtatgccgagcggttcagtccctgagagaggatcatggccaagccggtcgcaactatgc

SEQ ID NO: 5237 - DNA, 80 bp, Artificial Sequence
  Description of Artificial Sequence: Synthetic oligonucleotide
tgtatgggccgcgctaagtctgtatgccgagcggttcagtccagctataccacccacctccaagccggtcgcaactatgc

SEQ ID NO: 5238 - DNA, 80 bp, Artificial Sequence
  Description of Artificial Sequence: Synthetic oligonucleotide
tgtatgggccgcgctaagtctgtatgccgagcggttcagttggcttgaacaatccagagccaagccggtcgcaactatgc

SEQ ID NO: 5239 - DNA, 80 bp, Artificial Sequence
  Description of Artificial Sequence: Synthetic oligonucleotide
tgtatgggccgcgctaagtctgtatgccgagcggttcagttcctgagatcttgccctctccaagccggtcgcaactatgc

SEQ ID NO: 5240 - DNA, 80 bp, Artificial Sequence
  Description of Artificial Sequence: Synthetic oligonucleotide
tgtatgggccgcgctaagtctgtatgccgagcggttcagtgcacagacatggatggtacgcaagccggtcgcaactatgc

SEQ ID NO: 5241 - DNA, 80 bp, Artificial Sequence
  Description of Artificial Sequence: Synthetic oligonucleotide
tgtatgggccgcgctaagtctgtatgccgagcggttcagtttagcgggctgacatattgccaagccggtcgcaactatgc

SEQ ID NO: 5242 - DNA, 80 bp, Artificial Sequence
  Description of Artificial Sequence: Synthetic oligonucleotide
tgtatgggccgcgctaagtctgtatgccgagcggttcagttttcaggcagcaacatgtcccaagccggtcgcaactatgc

SEQ ID NO: 5243 - DNA, 80 bp, Artificial Sequence
  Description of Artificial Sequence: Synthetic oligonucleotide
tgtatgggccgcgctaagtctgtatgccgagcggttcagtccagatcgggtctctagccacaagccggtcgcaactatgc

SEQ ID NO: 5244 - DNA, 80 bp, Artificial Sequence
  Description of Artificial Sequence: Synthetic oligonucleotide
tgtatgggccgcgctaagtctgtatgccgagcggttcagttgccttgtgactcgccctctcaagccggtcgcaactatgc

SEQ ID NO: 5245 - DNA, 80 bp, Artificial Sequence
  Description of Artificial Sequence: Synthetic oligonucleotide
tgtatgggccgcgctaagtctgtatgccgagcggttcagtggaaactgtggaaggcttgtcaagccggtcgcaactatgc

SEQ ID NO: 5246 - DNA, 80 bp, Artificial Sequence
  Description of Artificial Sequence: Synthetic oligonucleotide
tgtatgggccgcgctaagtctgtatgccgagcggttcagtggttgaacacccaagcttctcaagccggtcgcaactatgc

SEQ ID NO: 5247 - DNA, 80 bp, Artificial Sequence
  Description of Artificial Sequence: Synthetic oligonucleotide
tgtatgggccgcgctaagtctgtatgccgagcggttcagtattgccaatcctcttgtgggcaagccggtcgcaactatgc

SEQ ID NO: 5248 - DNA, 80 bp, Artificial Sequence
  Description of Artificial Sequence: Synthetic oligonucleotide
tgtatgggccgcgctaagtctgtatgccgagcggttcagtctgagatcgaaggcaacagccaagccggtcgcaactatgc

SEQ ID NO: 5249 - DNA, 80 bp, Artificial Sequence
  Description of Artificial Sequence: Synthetic oligonucleotide
tgtatgggccgcgctaagtctgtatgccgagcggttcagtcatctgccaggtgtgtttgtcaagccggtcgcaactatgc

SEQ ID NO: 5250 - DNA, 80 bp, Artificial Sequence
  Description of Artificial Sequence: Synthetic oligonucleotide
tgtatgggccgcgctaagtctgtatgccgagcggttcagtatccattcactgcagtccctcaagccggtcgcaactatgc

SEQ ID NO: 5251 - DNA, 80 bp, Artificial Sequence
  Description of Artificial Sequence: Synthetic oligonucleotide
tgtatgggccgcgctaagtctgtatgccgagcggttcagttgttggctacctcgatgtcacaagccggtcgcaactatgc

SEQ ID NO: 5252 - DNA, 80 bp, Artificial Sequence
  Description of Artificial Sequence: Synthetic oligonucleotide
tgtatgggccgcgctaagtctgtatgccgagcggttcagtgccatttcaagacctgtcgtcaagccggtcgcaactatgc

SEQ ID NO: 5253 - DNA, 80 bp, Artificial Sequence
  Description of Artificial Sequence: Synthetic oligonucleotide
tgtatgggccgcgctaagtctgtatgccgagcggttcagtgacagaccccagcgtaaacccaagccggtcgcaactatgc

SEQ ID NO: 5254 - DNA, 80 bp, Artificial Sequence
  Description of Artificial Sequence: Synthetic oligonucleotide
tgtatgggccgcgctaagtctgtatgccgagcggttcagtgctgcacattctcccatacccaagccggtcgcaactatgc

SEQ ID NO: 5255 - DNA, 80 bp, Artificial Sequence
  Description of Artificial Sequence: Synthetic oligonucleotide
tgtatgggccgcgctaagtctgtatgccgagcggttcagtgttctggggtcgtgttcggacaagccggtcgcaactatgc

SEQ ID NO: 5256 - DNA, 80 bp, Artificial Sequence
  Description of Artificial Sequence: Synthetic oligonucleotide
tgtatgggccgcgctaagtctgtatgccgagcggttcagtccgaaaagtcgctgggagaacaagccggtcgcaactatgc

SEQ ID NO: 5257 - DNA, 80 bp, Artificial Sequence
  Description of Artificial Sequence: Synthetic oligonucleotide
tgtatgggccgcgctaagtctgtatgccgagcggttcagtttgagtctacagcaggtggccaagccggtcgcaactatgc

SEQ ID NO: 5258 - DNA, 80 bp, Artificial Sequence
  Description of Artificial Sequence: Synthetic oligonucleotide
tgtatgggccgcgctaagtctgtatgccgagcggttcagttggcagtccaagaagaacgtcaagccggtcgcaactatgc

SEQ ID NO: 5259 - DNA, 80 bp, Artificial Sequence
  Description of Artificial Sequence: Synthetic oligonucleotide
tgtatgggccgcgctaagtctgtatgccgagcggttcagtgagtggactcaggactcgatcaagccggtcgcaactatgc

SEQ ID NO: 5260 - DNA, 80 bp, Artificial Sequence
  Description of Artificial Sequence: Synthetic oligonucleotide
tgtatgggccgcgctaagtctgtatgccgagcggttcagtaagattttcccaggagccctcaagccggtcgcaactatgc

SEQ ID NO: 5261 - DNA, 80 bp, Artificial Sequence
  Description of Artificial Sequence: Synthetic oligonucleotide
tgtatgggccgcgctaagtctgtatgccgagcggttcagtctgctcgcagtagcctctaccaagccggtcgcaactatgc

SEQ ID NO: 5262 - DNA, 80 bp, Artificial Sequence
  Description of Artificial Sequence: Synthetic oligonucleotide
tgtatgggccgcgctaagtctgtatgccgagcggttcagttgctttcccatgaatcccgtcaagccggtcgcaactatgc

SEQ ID NO: 5263 - DNA, 80 bp, Artificial Sequence
  Description of Artificial Sequence: Synthetic oligonucleotide
tgtatgggccgcgctaagtctgtatgccgagcggttcagtcgggaaccggccgcaaaggacaagccggtcgcaactatgc

SEQ ID NO: 5264 - DNA, 80 bp, Artificial Sequence
  Description of Artificial Sequence: Synthetic oligonucleotide
tgtatgggccgcgctaagtctgtatgccgagcggttcagtgctcagcaagtacacatggccaagccggtcgcaactatgc

SEQ ID NO: 5265 - DNA, 80 bp, Artificial Sequence
  Description of Artificial Sequence: Synthetic oligonucleotide
tgtatgggccgcgctaagtctgtatgccgagcggttcagtagggctgcagtattccatggcaagccggtcgcaactatgc

SEQ ID NO: 5266 - DNA, 80 bp, Artificial Sequence
  Description of Artificial Sequence: Synthetic oligonucleotide
tgtatgggccgcgctaagtcagccggttcgtcaagtagcaagatcccgctgccgctttggcaagccggtcgcaactatgc

SEQ ID NO: 5267 - DNA, 80 bp, Artificial Sequence
  Description of Artificial Sequence: Synthetic oligonucleotide
tgtatgggccgcgctaagtcagccggttcgtcaagtagcatgatgtgcccaacagtagctcaagccggtcgcaactatgc

SEQ ID NO: 5268 - DNA, 80 bp, Artificial Sequence
  Description of Artificial Sequence: Synthetic oligonucleotide
tgtatgggccgcgctaagtcagccggttcgtcaagtagcaacctggagttgtgtgattgccaagccggtcgcaactatgc

SEQ ID NO: 5269 - DNA, 80 bp, Artificial Sequence
  Description of Artificial Sequence: Synthetic oligonucleotide
tgtatgggccgcgctaagtcagccggttcgtcaagtagcacacccagtagtgtgctgtcacaagccggtcgcaactatgc

SEQ ID NO: 5270 - DNA, 80 bp, Artificial Sequence
  Description of Artificial Sequence: Synthetic oligonucleotide
tgtatgggccgcgctaagtcagccggttcgtcaagtagcatgttcctggttgcaacaagccaagccggtcgcaactatgc

SEQ ID NO: 5271 - DNA, 80 bp, Artificial Sequence
  Description of Artificial Sequence: Synthetic oligonucleotide
tgtatgggccgcgctaagtcagccggttcgtcaagtagcaaaactgtaacatgcaggccccaagccggtcgcaactatgc

SEQ ID NO: 5272 - DNA, 80 bp, Artificial Sequence
  Description of Artificial Sequence: Synthetic oligonucleotide
tgtatgggccgcgctaagtcagccggttcgtcaagtagcaagtaatcagctgctctccgacaagccggtcgcaactatgc

SEQ ID NO: 5273 - DNA, 80 bp, Artificial Sequence
  Description of Artificial Sequence: Synthetic oligonucleotide
tgtatgggccgcgctaagtcagccggttcgtcaagtagcaactcagggcttgtttagggccaagccggtcgcaactatgc

SEQ ID NO: 5274 - DNA, 80 bp, Artificial Sequence
  Description of Artificial Sequence: Synthetic oligonucleotide
tgtatgggccgcgctaagtcagccggttcgtcaagtagcatttgcaacttggggatgagccaagccggtcgcaactatgc

SEQ ID NO: 5275 - DNA, 80 bp, Artificial Sequence
  Description of Artificial Sequence: Synthetic oligonucleotide
tgtatgggccgcgctaagtcagccggttcgtcaagtagcaagtcaactggcagaccaagacaagccggtcgcaactatgc

SEQ ID NO: 5276 - DNA, 80 bp, Artificial Sequence
  Description of Artificial Sequence: Synthetic oligonucleotide
tgtatgggccgcgctaagtcagccggttcgtcaagtagcaacttcagtggaccagggaaccaagccggtcgcaactatgc

SEQ ID NO: 5277 - DNA, 80 bp, Artificial Sequence
  Description of Artificial Sequence: Synthetic oligonucleotide
tgtatgggccgcgctaagtcagccggttcgtcaagtagcacacaaggtcgtggtgtgaggcaagccggtcgcaactatgc

SEQ ID NO: 5278 - DNA, 80 bp, Artificial Sequence
  Description of Artificial Sequence: Synthetic oligonucleotide
tgtatgggccgcgctaagtcagccggttcgtcaagtagcaacgaggcccaaattgatgagcaagccggtcgcaactatgc

SEQ ID NO: 5279 - DNA, 80 bp, Artificial Sequence
  Description of Artificial Sequence: Synthetic oligonucleotide
tgtatgggccgcgctaagtcagccggttcgtcaagtagcagcaaagtggctactggtccacaagccggtcgcaactatgc

SEQ ID NO: 5280 - DNA, 80 bp, Artificial Sequence
  Description of Artificial Sequence: Synthetic oligonucleotide
tgtatgggccgcgctaagtcagccggttcgtcaagtagcatgttgacattttgcacggggcaagccggtcgcaactatgc

SEQ ID NO: 5281 - DNA, 80 bp, Artificial Sequence
  Description of Artificial Sequence: Synthetic oligonucleotide
tgtatgggccgcgctaagtcagccggttcgtcaagtagcaggccctaacaacaaacctcccaagccggtcgcaactatgc

SEQ ID NO: 5282 - DNA, 80 bp, Artificial Sequence
  Description of Artificial Sequence: Synthetic oligonucleotide
tgtatgggccgcgctaagtcagccggttcgtcaagtagcaccttggatgccaaagaagcccaagccggtcgcaactatgc

SEQ ID NO: 5283 - DNA, 80 bp, Artificial Sequence
  Description of Artificial Sequence: Synthetic oligonucleotide
tgtatgggccgcgctaagtcagccggttcgtcaagtagcattcacggctttgtcctttggcaagccggtcgcaactatgc

SEQ ID NO: 5284 - DNA, 80 bp, Artificial Sequence
  Description of Artificial Sequence: Synthetic oligonucleotide
tgtatgggccgcgctaagtcagccggttcgtcaagtagcacctgagtaggaagcagcctgcaagccggtcgcaactatgc

SEQ ID NO: 5285 - DNA, 80 bp, Artificial Sequence
  Description of Artificial Sequence: Synthetic oligonucleotide
tgtatgggccgcgctaagtcagccggttcgtcaagtagcacgggtgaatgaagcgagaggcaagccggtcgcaactatgc

SEQ ID NO: 5286 - DNA, 80 bp, Artificial Sequence
  Description of Artificial Sequence: Synthetic oligonucleotide
tgtatgggccgcgctaagtcagccggttcgtcaagtagcattcagagtccccatgtctcccaagccggtcgcaactatgc

SEQ ID NO: 5287 - DNA, 80 bp, Artificial Sequence
  Description of Artificial Sequence: Synthetic oligonucleotide
tgtatgggccgcgctaagtcagccggttcgtcaagtagcaagatggtggtacctagaggccaagccggtcgcaactatgc

SEQ ID NO: 5288 - DNA, 80 bp, Artificial Sequence
  Description of Artificial Sequence: Synthetic oligonucleotide
tgtatgggccgcgctaagtcagccggttcgtcaagtagcaacaaccatcaccctagctgccaagccggtcgcaactatgc

SEQ ID NO: 5289 - DNA, 80 bp, Artificial Sequence
  Description of Artificial Sequence: Synthetic oligonucleotide
tgtatgggccgcgctaagtcagccggttcgtcaagtagcagttttcagctagccagtggccaagccggtcgcaactatgc

SEQ ID NO: 5290 - DNA, 80 bp, Artificial Sequence
  Description of Artificial Sequence: Synthetic oligonucleotide
tgtatgggccgcgctaagtcagccggttcgtcaagtagcagtttgggctgtctgcattctcaagccggtcgcaactatgc

SEQ ID NO: 5291 - DNA, 80 bp, Artificial Sequence
  Description of Artificial Sequence: Synthetic oligonucleotide
tgtatgggccgcgctaagtcagccggttcgtcaagtagcatggctgagactatggaagggcaagccggtcgcaactatgc

SEQ ID NO: 5292 - DNA, 80 bp, Artificial Sequence
  Description of Artificial Sequence: Synthetic oligonucleotide
tgtatgggccgcgctaagtcagccggttcgtcaagtagcatgcaagctccctatcaccctcaagccggtcgcaactatgc

SEQ ID NO: 5293 - DNA, 80 bp, Artificial Sequence
  Description of Artificial Sequence: Synthetic oligonucleotide
tgtatgggccgcgctaagtcagccggttcgtcaagtagcaagccacatccttgatgaagccaagccggtcgcaactatgc

SEQ ID NO: 5294 - DNA, 80 bp, Artificial Sequence
  Description of Artificial Sequence: Synthetic oligonucleotide
tgtatgggccgcgctaagtcagccggttcgtcaagtagcatcactggcaccatggaatctcaagccggtcgcaactatgc

SEQ ID NO: 5295 - DNA, 80 bp, Artificial Sequence
  Description of Artificial Sequence: Synthetic oligonucleotide
tgtatgggccgcgctaagtcagccggttcgtcaagtagcacatggctgtccaaggtcttgcaagccggtcgcaactatgc

SEQ ID NO: 5296 - DNA, 80 bp, Artificial Sequence
  Description of Artificial Sequence: Synthetic oligonucleotide
tgtatgggccgcgctaagtcagccggttcgtcaagtagcaccacagatgacaggtaggctcaagccggtcgcaactatgc

SEQ ID NO: 5297 - DNA, 80 bp, Artificial Sequence
  Description of Artificial Sequence: Synthetic oligonucleotide
tgtatgggccgcgctaagtcagccggttcgtcaagtagcatgtcccaagaatggagctgtcaagccggtcgcaactatgc

SEQ ID NO: 5298 - DNA, 80 bp, Artificial Sequence
  Description of Artificial Sequence: Synthetic oligonucleotide
tgtatgggccgcgctaagtcagccggttcgtcaagtagcagcatctcagtaggcccctttcaagccggtcgcaactatgc

SEQ ID NO: 5299 - DNA, 80 bp, Artificial Sequence
  Description of Artificial Sequence: Synthetic oligonucleotide
tgtatgggccgcgctaagtcagccggttcgtcaagtagcagtgagacacctctgcatgtgcaagccggtcgcaactatgc

SEQ ID NO: 5300 - DNA, 80 bp, Artificial Sequence
  Description of Artificial Sequence: Synthetic oligonucleotide
tgtatgggccgcgctaagtcagccggttcgtcaagtagcaatccctatccgcagctcgttcaagccggtcgcaactatgc

SEQ ID NO: 5301 - DNA, 80 bp, Artificial Sequence
  Description of Artificial Sequence: Synthetic oligonucleotide
tgtatgggccgcgctaagtcagccggttcgtcaagtagcaagaaaccaggtaggcgatgacaagccggtcgcaactatgc

SEQ ID NO: 5302 - DNA, 80 bp, Artificial Sequence
  Description of Artificial Sequence: Synthetic oligonucleotide
tgtatgggccgcgctaagtcagccggttcgtcaagtagcaatgagcaaggatgaggagcacaagccggtcgcaactatgc

SEQ ID NO: 5303 - DNA, 80 bp, Artificial Sequence
  Description of Artificial Sequence: Synthetic oligonucleotide
tgtatgggccgcgctaagtcagccggttcgtcaagtagcaaaggtccggctggaatcagacaagccggtcgcaactatgc

SEQ ID NO: 5304 - DNA, 80 bp, Artificial Sequence
  Description of Artificial Sequence: Synthetic oligonucleotide
tgtatgggccgcgctaagtcagccggttcgtcaagtagcaggccctgactatttgccctgcaagccggtcgcaactatgc

SEQ ID NO: 5305 - DNA, 80 bp, Artificial Sequence
  Description of Artificial Sequence: Synthetic oligonucleotide
tgtatgggccgcgctaagtcagccggttcgtcaagtagcaagcaacatgactcgtggagacaagccggtcgcaactatgc

SEQ ID NO: 5306 - DNA, 80 bp, Artificial Sequence
  Description of Artificial Sequence: Synthetic oligonucleotide
tgtatgggccgcgctaagtcagccggttcgtcaagtagcatgcagatgcagatgggcgttcaagccggtcgcaactatgc

SEQ ID NO: 5307 - DNA, 80 bp, Artificial Sequence
  Description of Artificial Sequence: Synthetic oligonucleotide
tgtatgggccgcgctaagtcagccggttcgtcaagtagcattggaatggtggcaagctagcaagccggtcgcaactatgc

SEQ ID NO: 5308 - DNA, 80 bp, Artificial Sequence
  Description of Artificial Sequence: Synthetic oligonucleotide
tgtatgggccgcgctaagtcagccggttcgtcaagtagcaagtgagcgtatgggagatgtcaagccggtcgcaactatgc

SEQ ID NO: 5309 - DNA, 80 bp, Artificial Sequence
  Description of Artificial Sequence: Synthetic oligonucleotide
tgtatgggccgcgctaagtcagccggttcgtcaagtagcaagagtgtcctgaggagcatgcaagccggtcgcaactatgc

SEQ ID NO: 5310 - DNA, 80 bp, Artificial Sequence
  Description of Artificial Sequence: Synthetic oligonucleotide
tgtatgggccgcgctaagtcagccggttcgtcaagtagcaccgtggcgaaagtgaatcaccaagccggtcgcaactatgc

SEQ ID NO: 5311 - DNA, 80 bp, Artificial Sequence
  Description of Artificial Sequence: Synthetic oligonucleotide
tgtatgggccgcgctaagtcagccggttcgtcaagtagcactctccagctgcccattccacaagccggtcgcaactatgc

SEQ ID NO: 5312 - DNA, 80 bp, Artificial Sequence
  Description of Artificial Sequence: Synthetic oligonucleotide
tgtatgggccgcgctaagtcagccggttcgtcaagtagcatgaatcttgaagcatgggcccaagccggtcgcaactatgc

SEQ ID NO: 5313 - DNA, 80 bp, Artificial Sequence
  Description of Artificial Sequence: Synthetic oligonucleotide
tgtatgggccgcgctaagtcagccggttcgtcaagtagcacttcaccaaggccaaggtttcaagccggtcgcaactatgc

SEQ ID NO: 5314 - DNA, 80 bp, Artificial Sequence
  Description of Artificial Sequence: Synthetic oligonucleotide
tgtatgggccgcgctaagtcagccggttcgtcaagtagcatgtcccttccctaacatgctcaagccggtcgcaactatgc

SEQ ID NO: 5315 - DNA, 80 bp, Artificial Sequence
  Description of Artificial Sequence: Synthetic oligonucleotide
tgtatgggccgcgctaagtcagccggttcgtcaagtagcattcagcacctatcaggcagacaagccggtcgcaactatgc

SEQ ID NO: 5316 - DNA, 80 bp, Artificial Sequence
  Description of Artificial Sequence: Synthetic oligonucleotide
tgtatgggccgcgctaagtcagccggttcgtcaagtagcattcctctaacggcttcctgacaagccggtcgcaactatgc

SEQ ID NO: 5317 - DNA, 80 bp, Artificial Sequence
  Description of Artificial Sequence: Synthetic oligonucleotide
tgtatgggccgcgctaagtcagccggttcgtcaagtagcaaccacatcccctgagtctctcaagccggtcgcaactatgc

SEQ ID NO: 5318 - DNA, 80 bp, Artificial Sequence
  Description of Artificial Sequence: Synthetic oligonucleotide
tgtatgggccgcgctaagtcagccggttcgtcaagtagcaagagtgggtgtcttacagctcaagccggtcgcaactatgc

SEQ ID NO: 5319 - DNA, 80 bp, Artificial Sequence
  Description of Artificial Sequence: Synthetic oligonucleotide
tgtatgggccgcgctaagtcagccggttcgtcaagtagcaggggtgggtacttcacacttcaagccggtcgcaactatgc

SEQ ID NO: 5320 - DNA, 80 bp, Artificial Sequence
  Description of Artificial Sequence: Synthetic oligonucleotide
tgtatgggccgcgctaagtcagccggttcgtcaagtagcaaaagggaaagcgtcattgggcaagccggtcgcaactatgc

SEQ ID NO: 5321 - DNA, 80 bp, Artificial Sequence
  Description of Artificial Sequence: Synthetic oligonucleotide
tgtatgggccgcgctaagtcagccggttcgtcaagtagcaacacgagtttcttccggagccaagccggtcgcaactatgc

SEQ ID NO: 5322 - DNA, 80 bp, Artificial Sequence
  Description of Artificial Sequence: Synthetic oligonucleotide
tgtatgggccgcgctaagtcagccggttcgtcaagtagcatgtggcaggtagaaaagtgccaagccggtcgcaactatgc

SEQ ID NO: 5323 - DNA, 80 bp, Artificial Sequence
  Description of Artificial Sequence: Synthetic oligonucleotide
tgtatgggccgcgctaagtcagccggttcgtcaagtagcaagcctaatcgattcctcccccaagccggtcgcaactatgc

SEQ ID NO: 5324 - DNA, 80 bp, Artificial Sequence
  Description of Artificial Sequence: Synthetic oligonucleotide
tgtatgggccgcgctaagtcagccggttcgtcaagtagcaagtgagggaaggatgctcaacaagccggtcgcaactatgc

SEQ ID NO: 5325 - DNA, 80 bp, Artificial Sequence
  Description of Artificial Sequence: Synthetic oligonucleotide
tgtatgggccgcgctaagtcagccggttcgtcaagtagcaggccatctcaagattccagccaagccggtcgcaactatgc

SEQ ID NO: 5326 - DNA, 80 bp, Artificial Sequence
  Description of Artificial Sequence: Synthetic oligonucleotide
tgtatgggccgcgctaagtcagccggttcgtcaagtagcagctttggctaaaggactccccaagccggtcgcaactatgc

SEQ ID NO: 5327 - DNA, 80 bp, Artificial Sequence
  Description of Artificial Sequence: Synthetic oligonucleotide
tgtatgggccgcgctaagtcagccggttcgtcaagtagcaacctctactacagtgggcagcaagccggtcgcaactatgc

SEQ ID NO: 5328 - DNA, 80 bp, Artificial Sequence
  Description of Artificial Sequence: Synthetic oligonucleotide
tgtatgggccgcgctaagtcagccggttcgtcaagtagcaagctgcagggaggtatcctacaagccggtcgcaactatgc

SEQ ID NO: 5329 - DNA, 80 bp, Artificial Sequence
  Description of Artificial Sequence: Synthetic oligonucleotide
tgtatgggccgcgctaagtcagccggttcgtcaagtagcagcttgagagtgggaccacaacaagccggtcgcaactatgc

SEQ ID NO: 5330 - DNA, 80 bp, Artificial Sequence
  Description of Artificial Sequence: Synthetic oligonucleotide
tgtatgggccgcgctaagtcagccggttcgtcaagtagcaatttgcattggtcaggcccacaagccggtcgcaactatgc

SEQ ID NO: 5331 - DNA, 80 bp, Artificial Sequence
  Description of Artificial Sequence: Synthetic oligonucleotide
tgtatgggccgcgctaagtcagccggttcgtcaagtagcaacagggctattggtacaggccaagccggtcgcaactatgc

SEQ ID NO: 5332 - DNA, 80 bp, Artificial Sequence
  Description of Artificial Sequence: Synthetic oligonucleotide
tgtatgggccgcgctaagtcagccggttcgtcaagtagcaaccagtggagatggtgttcccaagccggtcgcaactatgc

SEQ ID NO: 5333 - DNA, 80 bp, Artificial Sequence
  Description of Artificial Sequence: Synthetic oligonucleotide
tgtatgggccgcgctaagtcagccggttcgtcaagtagcatgctgaaacctctcccttgccaagccggtcgcaactatgc

SEQ ID NO: 5334 - DNA, 80 bp, Artificial Sequence
  Description of Artificial Sequence: Synthetic oligonucleotide
tgtatgggccgcgctaagtcagccggttcgtcaagtagcagggcaggcattatctgggtacaagccggtcgcaactatgc

SEQ ID NO: 5335 - DNA, 80 bp, Artificial Sequence
  Description of Artificial Sequence: Synthetic oligonucleotide
tgtatgggccgcgctaagtcagccggttcgtcaagtagcatggagttgttagggtgcagacaagccggtcgcaactatgc

SEQ ID NO: 5336 - DNA, 80 bp, Artificial Sequence
  Description of Artificial Sequence: Synthetic oligonucleotide
tgtatgggccgcgctaagtcagccggttcgtcaagtagcagctgaccgctatggaaacagcaagccggtcgcaactatgc

SEQ ID NO: 5337 - DNA, 80 bp, Artificial Sequence
  Description of Artificial Sequence: Synthetic oligonucleotide
tgtatgggccgcgctaagtcagccggttcgtcaagtagcatacatgagtcttgggaggggcaagccggtcgcaactatgc

SEQ ID NO: 5338 - DNA, 80 bp, Artificial Sequence
  Description of Artificial Sequence: Synthetic oligonucleotide
tgtatgggccgcgctaagtcagccggttcgtcaagtagcaggttcccgtgttcgatgcatcaagccggtcgcaactatgc

SEQ ID NO: 5339 - DNA, 80 bp, Artificial Sequence
  Description of Artificial Sequence: Synthetic oligonucleotide
tgtatgggccgcgctaagtcagccggttcgtcaagtagcaatggacatgcgcattaccctcaagccggtcgcaactatgc

SEQ ID NO: 5340 - DNA, 80 bp, Artificial Sequence
  Description of Artificial Sequence: Synthetic oligonucleotide
tgtatgggccgcgctaagtcagccggttcgtcaagtagcagtgtcatcctcggggacatgcaagccggtcgcaactatgc

SEQ ID NO: 5341 - DNA, 80 bp, Artificial Sequence
  Description of Artificial Sequence: Synthetic oligonucleotide
tgtatgggccgcgctaagtcagccggttcgtcaagtagcaagagcaaatcactcccagcccaagccggtcgcaactatgc

SEQ ID NO: 5342 - DNA, 80 bp, Artificial Sequence
  Description of Artificial Sequence: Synthetic oligonucleotide
tgtatgggccgcgctaagtcagccggttcgtcaagtagcagagcagggccaagttgacagcaagccggtcgcaactatgc

SEQ ID NO: 5343 - DNA, 80 bp, Artificial Sequence
  Description of Artificial Sequence: Synthetic oligonucleotide
tgtatgggccgcgctaagtcagccggttcgtcaagtagcaagctgtagacctcggacaagcaagccggtcgcaactatgc

SEQ ID NO: 5344 - DNA, 80 bp, Artificial Sequence
  Description of Artificial Sequence: Synthetic oligonucleotide
tgtatgggccgcgctaagtcagccggttcgtcaagtagcatgtgttttgtggcaagtgggcaagccggtcgcaactatgc

SEQ ID NO: 5345 - DNA, 80 bp, Artificial Sequence
  Description of Artificial Sequence: Synthetic oligonucleotide
tgtatgggccgcgctaagtcagccggttcgtcaagtagcaccaggtgatcggcaaaatgacaagccggtcgcaactatgc

SEQ ID NO: 5346 - DNA, 80 bp, Artificial Sequence
  Description of Artificial Sequence: Synthetic oligonucleotide
tgtatgggccgcgctaagtcagccggttcgtcaagtagcacccagttatctcggggcttacaagccggtcgcaactatgc

SEQ ID NO: 5347 - DNA, 80 bp, Artificial Sequence
  Description of Artificial Sequence: Synthetic oligonucleotide
tgtatgggccgcgctaagtcagccggttcgtcaagtagcacccgtggggctttaatgacacaagccggtcgcaactatgc

SEQ ID NO: 5348 - DNA, 80 bp, Artificial Sequence
  Description of Artificial Sequence: Synthetic oligonucleotide
tgtatgggccgcgctaagtcagccggttcgtcaagtagcaggcttgggctgtaattctgccaagccggtcgcaactatgc

SEQ ID NO: 5349 - DNA, 80 bp, Artificial Sequence
  Description of Artificial Sequence: Synthetic oligonucleotide
tgtatgggccgcgctaagtcagccggttcgtcaagtagcacacagctgtggttgccttggcaagccggtcgcaactatgc

SEQ ID NO: 5350 - DNA, 80 bp, Artificial Sequence
  Description of Artificial Sequence: Synthetic oligonucleotide
tgtatgggccgcgctaagtcagccggttcgtcaagtagcattcacctttctcaggaggcccaagccggtcgcaactatgc

SEQ ID NO: 5351 - DNA, 80 bp, Artificial Sequence
  Description of Artificial Sequence: Synthetic oligonucleotide
tgtatgggccgcgctaagtcagccggttcgtcaagtagcaatgctttccatgagggcacccaagccggtcgcaactatgc

SEQ ID NO: 5352 - DNA, 80 bp, Artificial Sequence
  Description of Artificial Sequence: Synthetic oligonucleotide
tgtatgggccgcgctaagtcagccggttcgtcaagtagcaaacccgctcagtagtttccacaagccggtcgcaactatgc

SEQ ID NO: 5353 - DNA, 80 bp, Artificial Sequence
  Description of Artificial Sequence: Synthetic oligonucleotide
tgtatgggccgcgctaagtcagccggttcgtcaagtagcatttgccgggccatcatgacgcaagccggtcgcaactatgc

SEQ ID NO: 5354 - DNA, 80 bp, Artificial Sequence
  Description of Artificial Sequence: Synthetic oligonucleotide
tgtatgggccgcgctaagtcagccggttcgtcaagtagcacctgctgactggggtagagacaagccggtcgcaactatgc

SEQ ID NO: 5355 - DNA, 80 bp, Artificial Sequence
  Description of Artificial Sequence: Synthetic oligonucleotide
tgtatgggccgcgctaagtcagccggttcgtcaagtagcagcaaggtttgggagactggtcaagccggtcgcaactatgc

SEQ ID NO: 5356 - DNA, 80 bp, Artificial Sequence
  Description of Artificial Sequence: Synthetic oligonucleotide
tgtatgggccgcgctaagtcagccggttcgtcaagtagcaccagtcaggtatcagtgccacaagccggtcgcaactatgc

SEQ ID NO: 5357 - DNA, 80 bp, Artificial Sequence
  Description of Artificial Sequence: Synthetic oligonucleotide
tgtatgggccgcgctaagtcagccggttcgtcaagtagcattcaagcaacccagaagtcgcaagccggtcgcaactatgc

SEQ ID NO: 5358 - DNA, 80 bp, Artificial Sequence
  Description of Artificial Sequence: Synthetic oligonucleotide
tgtatgggccgcgctaagtcagccggttcgtcaagtagcaagccgtgcttgtaactgagtcaagccggtcgcaactatgc

SEQ ID NO: 5359 - DNA, 80 bp, Artificial Sequence
  Description of Artificial Sequence: Synthetic oligonucleotide
tgtatgggccgcgctaagtcagccggttcgtcaagtagcactgctgctcaagtaggcacccaagccggtcgcaactatgc

SEQ ID NO: 5360 - DNA, 80 bp, Artificial Sequence
  Description of Artificial Sequence: Synthetic oligonucleotide
tgtatgggccgcgctaagtcagccggttcgtcaagtagcaacccctcttcattccctcatcaagccggtcgcaactatgc

SEQ ID NO: 5361 - DNA, 80 bp, Artificial Sequence
  Description of Artificial Sequence: Synthetic oligonucleotide
tgtatgggccgcgctaagtcagccggttcgtcaagtagcacctcatccacaagttgccaacaagccggtcgcaactatgc

SEQ ID NO: 5362 - DNA, 80 bp, Artificial Sequence
  Description of Artificial Sequence: Synthetic oligonucleotide
tgtatgggccgcgctaagtcagccggttcgtcaagtagcaccccaggccatagactcaggcaagccggtcgcaactatgc

SEQ ID NO: 5363 - DNA, 80 bp, Artificial Sequence
  Description of Artificial Sequence: Synthetic oligonucleotide
tgtatgggccgcgctaagtcagccggttcgtcaagtagcaaaaccttctaagggcaaggccaagccggtcgcaactatgc

SEQ ID NO: 5364 - DNA, 80 bp, Artificial Sequence
  Description of Artificial Sequence: Synthetic oligonucleotide
tgtatgggccgcgctaagtcagccggttcgtcaagtagcatctcctaggcagtgtagcggcaagccggtcgcaactatgc

SEQ ID NO: 5365 - DNA, 80 bp, Artificial Sequence
  Description of Artificial Sequence: Synthetic oligonucleotide
tgtatgggccgcgctaagtcagccggttcgtcaagtagcacggggccgcttttcagggagcaagccggtcgcaactatgc

SEQ ID NO: 5366 - DNA, 80 bp, Artificial Sequence
  Description of Artificial Sequence: Synthetic oligonucleotide
tgtatgggccgcgctaagtcagccggttcgtcaagtagcagcagtggagtcccagatttgcaagccggtcgcaactatgc

SEQ ID NO: 5367 - DNA, 80 bp, Artificial Sequence
  Description of Artificial Sequence: Synthetic oligonucleotide
tgtatgggccgcgctaagtcagccggttcgtcaagtagcaattccctgccctacaacccacaagccggtcgcaactatgc

SEQ ID NO: 5368 - DNA, 80 bp, Artificial Sequence
  Description of Artificial Sequence: Synthetic oligonucleotide
tgtatgggccgcgctaagtcagccggttcgtcaagtagcacaaccatgactctgggcacacaagccggtcgcaactatgc

SEQ ID NO: 5369 - DNA, 80 bp, Artificial Sequence
  Description of Artificial Sequence: Synthetic oligonucleotide
tgtatgggccgcgctaagtcagccggttcgtcaagtagcaaagggtaaggccagagaaggcaagccggtcgcaactatgc

SEQ ID NO: 5370 - DNA, 80 bp, Artificial Sequence
  Description of Artificial Sequence: Synthetic oligonucleotide
tgtatgggccgcgctaagtcagccggttcgtcaagtagcaccttcccgaagagaaaggcacaagccggtcgcaactatgc

SEQ ID NO: 5371 - DNA, 80 bp, Artificial Sequence
  Description of Artificial Sequence: Synthetic oligonucleotide
tgtatgggccgcgctaagtcagccggttcgtcaagtagcactggtctgcagcatcctgggcaagccggtcgcaactatgc

SEQ ID NO: 5372 - DNA, 80 bp, Artificial Sequence
  Description of Artificial Sequence: Synthetic oligonucleotide
tgtatgggccgcgctaagtcagccggttcgtcaagtagcagggactttggctcagacagtcaagccggtcgcaactatgc

SEQ ID NO: 5373 - DNA, 80 bp, Artificial Sequence
  Description of Artificial Sequence: Synthetic oligonucleotide
tgtatgggccgcgctaagtcagccggttcgtcaagtagcaagtaccttgcaccgctgagacaagccggtcgcaactatgc

SEQ ID NO: 5374 - DNA, 80 bp, Artificial Sequence
  Description of Artificial Sequence: Synthetic oligonucleotide
tgtatgggccgcgctaagtcagccggttcgtcaagtagcacttcccggcctttgagaacgcaagccggtcgcaactatgc

SEQ ID NO: 5375 - DNA, 80 bp, Artificial Sequence
  Description of Artificial Sequence: Synthetic oligonucleotide
tgtatgggccgcgctaagtcagccggttcgtcaagtagcaaagaaggacctcggcagatgcaagccggtcgcaactatgc

SEQ ID NO: 5376 - DNA, 80 bp, Artificial Sequence
  Description of Artificial Sequence: Synthetic oligonucleotide
tgtatgggccgcgctaagtcagccggttcgtcaagtagcacgttcatgagcccattcagccaagccggtcgcaactatgc

SEQ ID NO: 5377 - DNA, 80 bp, Artificial Sequence
  Description of Artificial Sequence: Synthetic oligonucleotide
tgtatgggccgcgctaagtcagccggttcgtcaagtagcaattagctcctagcagtggcccaagccggtcgcaactatgc

SEQ ID NO: 5378 - DNA, 80 bp, Artificial Sequence
  Description of Artificial Sequence: Synthetic oligonucleotide
tgtatgggccgcgctaagtcagccggttcgtcaagtagcaccaccagggctttactgcaacaagccggtcgcaactatgc

SEQ ID NO: 5379 - DNA, 80 bp, Artificial Sequence
  Description of Artificial Sequence: Synthetic oligonucleotide
tgtatgggccgcgctaagtcagccggttcgtcaagtagcaaagccaactgcatacgtcagcaagccggtcgcaactatgc

SEQ ID NO: 5380 - DNA, 80 bp, Artificial Sequence
  Description of Artificial Sequence: Synthetic oligonucleotide
tgtatgggccgcgctaagtcagccggttcgtcaagtagcatccaggatgaggtgtttggccaagccggtcgcaactatgc

SEQ ID NO: 5381 - DNA, 80 bp, Artificial Sequence
  Description of Artificial Sequence: Synthetic oligonucleotide
tgtatgggccgcgctaagtctgtatgccgagcggttcagtctgcagtgccaacattttgccaagccggtcgcaactatgc

SEQ ID NO: 5382 - DNA, 80 bp, Artificial Sequence
  Description of Artificial Sequence: Synthetic oligonucleotide
tgtatgggccgcgctaagtctgtatgccgagcggttcagtctttgtcgtgaatacccgcacaagccggtcgcaactatgc

SEQ ID NO: 5383 - DNA, 80 bp, Artificial Sequence
  Description of Artificial Sequence: Synthetic oligonucleotide
tgtatgggccgcgctaagtctgtatgccgagcggttcagtagggaaagcctagccgaatccaagccggtcgcaactatgc

SEQ ID NO: 5384 - DNA, 80 bp, Artificial Sequence
  Description of Artificial Sequence: Synthetic oligonucleotide
tgtatgggccgcgctaagtctgtatgccgagcggttcagtccatcaaagtgttgggctgacaagccggtcgcaactatgc

SEQ ID NO: 5385 - DNA, 80 bp, Artificial Sequence
  Description of Artificial Sequence: Synthetic oligonucleotide
tgtatgggccgcgctaagtctgtatgccgagcggttcagtaacatttgggattgacgccccaagccggtcgcaactatgc

SEQ ID NO: 5386 - DNA, 80 bp, Artificial Sequence
  Description of Artificial Sequence: Synthetic oligonucleotide
tgtatgggccgcgctaagtctgtatgccgagcggttcagtagccctttacaacgactgcccaagccggtcgcaactatgc

SEQ ID NO: 5387 - DNA, 80 bp, Artificial Sequence
  Description of Artificial Sequence: Synthetic oligonucleotide
tgtatgggccgcgctaagtctgtatgccgagcggttcagtcccctttggaatgaggctcacaagccggtcgcaactatgc

SEQ ID NO: 5388 - DNA, 80 bp, Artificial Sequence
  Description of Artificial Sequence: Synthetic oligonucleotide
tgtatgggccgcgctaagtctgtatgccgagcggttcagtactagatgtgctgctggtgccaagccggtcgcaactatgc

SEQ ID NO: 5389 - DNA, 80 bp, Artificial Sequence
  Description of Artificial Sequence: Synthetic oligonucleotide
tgtatgggccgcgctaagtctgtatgccgagcggttcagtttgacttttgtggcctcagccaagccggtcgcaactatgc

SEQ ID NO: 5390 - DNA, 80 bp, Artificial Sequence
  Description of Artificial Sequence: Synthetic oligonucleotide
tgtatgggccgcgctaagtctgtatgccgagcggttcagtgagtcagaaacatgcagcgccaagccggtcgcaactatgc

SEQ ID NO: 5391 - DNA, 80 bp, Artificial Sequence
  Description of Artificial Sequence: Synthetic oligonucleotide
tgtatgggccgcgctaagtctgtatgccgagcggttcagtttcccaggagcttacaaggccaagccggtcgcaactatgc

SEQ ID NO: 5392 - DNA, 80 bp, Artificial Sequence
  Description of Artificial Sequence: Synthetic oligonucleotide
tgtatgggccgcgctaagtctgtatgccgagcggttcagttggcagttctacacacccaacaagccggtcgcaactatgc

SEQ ID NO: 5393 - DNA, 80 bp, Artificial Sequence
  Description of Artificial Sequence: Synthetic oligonucleotide
tgtatgggccgcgctaagtctgtatgccgagcggttcagtcctcatcaaacaggcagccccaagccggtcgcaactatgc

SEQ ID NO: 5394 - DNA, 80 bp, Artificial Sequence
  Description of Artificial Sequence: Synthetic oligonucleotide
tgtatgggccgcgctaagtctgtatgccgagcggttcagtcactcctgttgttgcctccccaagccggtcgcaactatgc

SEQ ID NO: 5395 - DNA, 80 bp, Artificial Sequence
  Description of Artificial Sequence: Synthetic oligonucleotide
tgtatgggccgcgctaagtctgtatgccgagcggttcagtagggtcagccacatccaagacaagccggtcgcaactatgc

SEQ ID NO: 5396 - DNA, 80 bp, Artificial Sequence
  Description of Artificial Sequence: Synthetic oligonucleotide
tgtatgggccgcgctaagtctgtatgccgagcggttcagtagcatgcaggtgccggagtacaagccggtcgcaactatgc

SEQ ID NO: 5397 - DNA, 80 bp, Artificial Sequence
  Description of Artificial Sequence: Synthetic oligonucleotide
tgtatgggccgcgctaagtctgtatgccgagcggttcagttggctaaagctgggtggtctcaagccggtcgcaactatgc

SEQ ID NO: 5398 - DNA, 80 bp, Artificial Sequence
  Description of Artificial Sequence: Synthetic oligonucleotide
tgtatgggccgcgctaagtctgtatgccgagcggttcagttgaccacactccagaaaggacaagccggtcgcaactatgc

SEQ ID NO: 5399 - DNA, 80 bp, Artificial Sequence
  Description of Artificial Sequence: Synthetic oligonucleotide
tgtatgggccgcgctaagtctgtatgccgagcggttcagtaagccggcaaaagtactgctcaagccggtcgcaactatgc

SEQ ID NO: 5400 - DNA, 80 bp, Artificial Sequence
  Description of Artificial Sequence: Synthetic oligonucleotide
tgtatgggccgcgctaagtctgtatgccgagcggttcagtccaacaccctggtggagaaacaagccggtcgcaactatgc

SEQ ID NO: 5401 - DNA, 80 bp, Artificial Sequence
  Description of Artificial Sequence: Synthetic oligonucleotide
tgtatgggccgcgctaagtctgtatgccgagcggttcagtggtggctaggaaactctgggcaagccggtcgcaactatgc

SEQ ID NO: 5402 - DNA, 80 bp, Artificial Sequence
  Description of Artificial Sequence: Synthetic oligonucleotide
tgtatgggccgcgctaagtctgtatgccgagcggttcagtatagcccagtgtcagttggacaagccggtcgcaactatgc

SEQ ID NO: 5403 - DNA, 80 bp, Artificial Sequence
  Description of Artificial Sequence: Synthetic oligonucleotide
tgtatgggccgcgctaagtctgtatgccgagcggttcagtagctgggagagttacatggccaagccggtcgcaactatgc

SEQ ID NO: 5404 - DNA, 80 bp, Artificial Sequence
  Description of Artificial Sequence: Synthetic oligonucleotide
tgtatgggccgcgctaagtctgtatgccgagcggttcagttgggcattttgtctgcaggtcaagccggtcgcaactatgc

SEQ ID NO: 5405 - DNA, 80 bp, Artificial Sequence
  Description of Artificial Sequence: Synthetic oligonucleotide
tgtatgggccgcgctaagtctgtatgccgagcggttcagtgcagagcgagcaccagcatgcaagccggtcgcaactatgc

SEQ ID NO: 5406 - DNA, 80 bp, Artificial Sequence
  Description of Artificial Sequence: Synthetic oligonucleotide
tgtatgggccgcgctaagtctgtatgccgagcggttcagtgaggcggaggggctgagacacaagccggtcgcaactatgc

SEQ ID NO: 5407 - DNA, 80 bp, Artificial Sequence
  Description of Artificial Sequence: Synthetic oligonucleotide
tgtatgggccgcgctaagtctgtatgccgagcggttcagtatacattgcccgaggttccacaagccggtcgcaactatgc

SEQ ID NO: 5408 - DNA, 80 bp, Artificial Sequence
  Description of Artificial Sequence: Synthetic oligonucleotide
tgtatgggccgcgctaagtctgtatgccgagcggttcagtacgctccaacttgttccacccaagccggtcgcaactatgc

SEQ ID NO: 5409 - DNA, 80 bp, Artificial Sequence
  Description of Artificial Sequence: Synthetic oligonucleotide
tgtatgggccgcgctaagtctgtatgccgagcggttcagtgacattcagttgggtggagccaagccggtcgcaactatgc

SEQ ID NO: 5410 - DNA, 80 bp, Artificial Sequence
  Description of Artificial Sequence: Synthetic oligonucleotide
tgtatgggccgcgctaagtctgtatgccgagcggttcagtttggatgtaggccgcctggacaagccggtcgcaactatgc

SEQ ID NO: 5411 - DNA, 80 bp, Artificial Sequence
  Description of Artificial Sequence: Synthetic oligonucleotide
tgtatgggccgcgctaagtctgtatgccgagcggttcagtcctgggtctgttggggatatcaagccggtcgcaactatgc

SEQ ID NO: 5412 - DNA, 80 bp, Artificial Sequence
  Description of Artificial Sequence: Synthetic oligonucleotide
tgtatgggccgcgctaagtctgtatgccgagcggttcagtctgtgccactgaagaggaggcaagccggtcgcaactatgc

SEQ ID NO: 5413 - DNA, 80 bp, Artificial Sequence
  Description of Artificial Sequence: Synthetic oligonucleotide
tgtatgggccgcgctaagtctgtatgccgagcggttcagtcagtttctgagaacgcagcacaagccggtcgcaactatgc

SEQ ID NO: 5414 - DNA, 80 bp, Artificial Sequence
  Description of Artificial Sequence: Synthetic oligonucleotide
tgtatgggccgcgctaagtctgtatgccgagcggttcagtacttgatgataccgggagctcaagccggtcgcaactatgc

SEQ ID NO: 5415 - DNA, 80 bp, Artificial Sequence
  Description of Artificial Sequence: Synthetic oligonucleotide
tgtatgggccgcgctaagtctgtatgccgagcggttcagtacagagggctaaggtcagcacaagccggtcgcaactatgc

SEQ ID NO: 5416 - DNA, 80 bp, Artificial Sequence
  Description of Artificial Sequence: Synthetic oligonucleotide
tgtatgggccgcgctaagtctgtatgccgagcggttcagtatgcctttgtccacctgcttcaagccggtcgcaactatgc

SEQ ID NO: 5417 - DNA, 80 bp, Artificial Sequence
  Description of Artificial Sequence: Synthetic oligonucleotide
tgtatgggccgcgctaagtctgtatgccgagcggttcagttccctccacagaatttggcacaagccggtcgcaactatgc

SEQ ID NO: 5418 - DNA, 80 bp, Artificial Sequence
  Description of Artificial Sequence: Synthetic oligonucleotide
tgtatgggccgcgctaagtctgtatgccgagcggttcagttgcagagagatgagtgctggcaagccggtcgcaactatgc

SEQ ID NO: 5419 - DNA, 80 bp, Artificial Sequence
  Description of Artificial Sequence: Synthetic oligonucleotide
tgtatgggccgcgctaagtctgtatgccgagcggttcagtctgcacacagatttcccctgcaagccggtcgcaactatgc

SEQ ID NO: 5420 - DNA, 80 bp, Artificial Sequence
  Description of Artificial Sequence: Synthetic oligonucleotide
tgtatgggccgcgctaagtctgtatgccgagcggttcagttagattcacaggtgtcccgtcaagccggtcgcaactatgc

SEQ ID NO: 5421 - DNA, 80 bp, Artificial Sequence
  Description of Artificial Sequence: Synthetic oligonucleotide
tgtatgggccgcgctaagtctgtatgccgagcggttcagtatgctggcttccatcctactcaagccggtcgcaactatgc

SEQ ID NO: 5422 - DNA, 80 bp, Artificial Sequence
  Description of Artificial Sequence: Synthetic oligonucleotide
tgtatgggccgcgctaagtctgtatgccgagcggttcagtacgttgggttaagcagtgaccaagccggtcgcaactatgc

SEQ ID NO: 5423 - DNA, 80 bp, Artificial Sequence
  Description of Artificial Sequence: Synthetic oligonucleotide
tgtatgggccgcgctaagtctgtatgccgagcggttcagtagtgggaaaatcgacgagggcaagccggtcgcaactatgc

SEQ ID NO: 5424 - DNA, 80 bp, Artificial Sequence
  Description of Artificial Sequence: Synthetic oligonucleotide
tgtatgggccgcgctaagtctgtatgccgagcggttcagtactggtacctggagaggctccaagccggtcgcaactatgc

SEQ ID NO: 5425 - DNA, 80 bp, Artificial Sequence
  Description of Artificial Sequence: Synthetic oligonucleotide
tgtatgggccgcgctaagtctgtatgccgagcggttcagtttctttaggggtgggacagtcaagccggtcgcaactatgc

SEQ ID NO: 5426 - DNA, 80 bp, Artificial Sequence
  Description of Artificial Sequence: Synthetic oligonucleotide
tgtatgggccgcgctaagtctgtatgccgagcggttcagtgctacccacagactcctacccaagccggtcgcaactatgc

SEQ ID NO: 5427 - DNA, 80 bp, Artificial Sequence
  Description of Artificial Sequence: Synthetic oligonucleotide
tgtatgggccgcgctaagtctgtatgccgagcggttcagtccagatggccagatgtcgttcaagccggtcgcaactatgc

SEQ ID NO: 5428 - DNA, 80 bp, Artificial Sequence
  Description of Artificial Sequence: Synthetic oligonucleotide
tgtatgggccgcgctaagtctgtatgccgagcggttcagtcaggtccaagatcttgcccacaagccggtcgcaactatgc

SEQ ID NO: 5429 - DNA, 80 bp, Artificial Sequence
  Description of Artificial Sequence: Synthetic oligonucleotide
tgtatgggccgcgctaagtctgtatgccgagcggttcagttcagcttgctttctctgcagcaagccggtcgcaactatgc

SEQ ID NO: 5430 - DNA, 80 bp, Artificial Sequence
  Description of Artificial Sequence: Synthetic oligonucleotide
tgtatgggccgcgctaagtctgtatgccgagcggttcagtagcactttaatgcagggagccaagccggtcgcaactatgc

SEQ ID NO: 5431 - DNA, 80 bp, Artificial Sequence
  Description of Artificial Sequence: Synthetic oligonucleotide
tgtatgggccgcgctaagtctgtatgccgagcggttcagtgcgagtgcaggcccacacaacaagccggtcgcaactatgc

SEQ ID NO: 5432 - DNA, 80 bp, Artificial Sequence
  Description of Artificial Sequence: Synthetic oligonucleotide
tgtatgggccgcgctaagtctgtatgccgagcggttcagtgccctgcccggtgacttagtcaagccggtcgcaactatgc

SEQ ID NO: 5433 - DNA, 80 bp, Artificial Sequence
  Description of Artificial Sequence: Synthetic oligonucleotide
tgtatgggccgcgctaagtctgtatgccgagcggttcagtggtacatgaacccaaccgaccaagccggtcgcaactatgc

SEQ ID NO: 5434 - DNA, 80 bp, Artificial Sequence
  Description of Artificial Sequence: Synthetic oligonucleotide
tgtatgggccgcgctaagtctgtatgccgagcggttcagtggagaagccgccatcttaggcaagccggtcgcaactatgc

SEQ ID NO: 5435 - DNA, 80 bp, Artificial Sequence
  Description of Artificial Sequence: Synthetic oligonucleotide
tgtatgggccgcgctaagtctgtatgccgagcggttcagtgccgctgaagaccttgagcccaagccggtcgcaactatgc

SEQ ID NO: 5436 - DNA, 80 bp, Artificial Sequence
  Description of Artificial Sequence: Synthetic oligonucleotide
tgtatgggccgcgctaagtcagccggttcgtcaagtagcaatgacccaccgagctgtgctcaagccggtcgcaactatgc

SEQ ID NO: 5437 - DNA, 80 bp, Artificial Sequence
  Description of Artificial Sequence: Synthetic oligonucleotide
tgtatgggccgcgctaagtcagccggttcgtcaagtagcaccactgggttgaatgccacacaagccggtcgcaactatgc

SEQ ID NO: 5438 - DNA, 80 bp, Artificial Sequence
  Description of Artificial Sequence: Synthetic oligonucleotide
tgtatgggccgcgctaagtcagccggttcgtcaagtagcaaggaaccctggaatctgctacaagccggtcgcaactatgc

SEQ ID NO: 5439 - DNA, 80 bp, Artificial Sequence
  Description of Artificial Sequence: Synthetic oligonucleotide
tgtatgggccgcgctaagtcagccggttcgtcaagtagcagagcatttcacccgcctggacaagccggtcgcaactatgc

SEQ ID NO: 5440 - DNA, 80 bp, Artificial Sequence
  Description of Artificial Sequence: Synthetic oligonucleotide
tgtatgggccgcgctaagtcagccggttcgtcaagtagcaaccagaatacccagttgccccaagccggtcgcaactatgc

SEQ ID NO: 5441 - DNA, 80 bp, Artificial Sequence
  Description of Artificial Sequence: Synthetic oligonucleotide
tgtatgggccgcgctaagtcagccggttcgtcaagtagcagatcccaatccctctcacctcaagccggtcgcaactatgc

SEQ ID NO: 5442 - DNA, 80 bp, Artificial Sequence
  Description of Artificial Sequence: Synthetic oligonucleotide
tgtatgggccgcgctaagtcagccggttcgtcaagtagcagaactggctgtgcttatggccaagccggtcgcaactatgc

SEQ ID NO: 5443 - DNA, 80 bp, Artificial Sequence
  Description of Artificial Sequence: Synthetic oligonucleotide
tgtatgggccgcgctaagtcagccggttcgtcaagtagcaacccctgtgtatcaatggctcaagccggtcgcaactatgc

SEQ ID NO: 5444 - DNA, 80 bp, Artificial Sequence
  Description of Artificial Sequence: Synthetic oligonucleotide
tgtatgggccgcgctaagtcagccggttcgtcaagtagcatggcatcatcgggtcagaaacaagccggtcgcaactatgc

SEQ ID NO: 5445 - DNA, 80 bp, Artificial Sequence
  Description of Artificial Sequence: Synthetic oligonucleotide
tgtatgggccgcgctaagtcagccggttcgtcaagtagcactggggcaggattaccaacccaagccggtcgcaactatgc

SEQ ID NO: 5446 - DNA, 80 bp, Artificial Sequence
  Description of Artificial Sequence: Synthetic oligonucleotide
tgtatgggccgcgctaagtcagccggttcgtcaagtagcagatccagagggagacacactcaagccggtcgcaactatgc

SEQ ID NO: 5447 - DNA, 80 bp, Artificial Sequence
  Description of Artificial Sequence: Synthetic oligonucleotide
tgtatgggccgcgctaagtcagccggttcgtcaagtagcaagctggtggttagtcagtcacaagccggtcgcaactatgc

SEQ ID NO: 5448 - DNA, 80 bp, Artificial Sequence
  Description of Artificial Sequence: Synthetic oligonucleotide
tgtatgggccgcgctaagtcagccggttcgtcaagtagcagcaaccctattccaatggctcaagccggtcgcaactatgc

SEQ ID NO: 5449 - DNA, 80 bp, Artificial Sequence
  Description of Artificial Sequence: Synthetic oligonucleotide
tgtatgggccgcgctaagtcagccggttcgtcaagtagcatgggttgcaatgccaaatgtcaagccggtcgcaactatgc

SEQ ID NO: 5450 - DNA, 80 bp, Artificial Sequence
  Description of Artificial Sequence: Synthetic oligonucleotide
tgtatgggccgcgctaagtcagccggttcgtcaagtagcaagtggtcccatactgtgtgccaagccggtcgcaactatgc

SEQ ID NO: 5451 - DNA, 80 bp, Artificial Sequence
  Description of Artificial Sequence: Synthetic oligonucleotide
tgtatgggccgcgctaagtcagccggttcgtcaagtagcatctgctcaccactgatgtctcaagccggtcgcaactatgc

SEQ ID NO: 5452 - DNA, 80 bp, Artificial Sequence
  Description of Artificial Sequence: Synthetic oligonucleotide
tgtatgggccgcgctaagtcagccggttcgtcaagtagcaatcaaagcaggcgtctctcacaagccggtcgcaactatgc

SEQ ID NO: 5453 - DNA, 80 bp, Artificial Sequence
  Description of Artificial Sequence: Synthetic oligonucleotide
tgtatgggccgcgctaagtcagccggttcgtcaagtagcacggcagcgcgagagaagtcacaagccggtcgcaactatgc

SEQ ID NO: 5454 - DNA, 80 bp, Artificial Sequence
  Description of Artificial Sequence: Synthetic oligonucleotide
tgtatgggccgcgctaagtcagccggttcgtcaagtagcagatcgcgatcacagcctaaccaagccggtcgcaactatgc

SEQ ID NO: 5455 - DNA, 80 bp, Artificial Sequence
  Description of Artificial Sequence: Synthetic oligonucleotide
tgtatgggccgcgctaagtcagccggttcgtcaagtagcaaaagacgtgtgatgggaggccaagccggtcgcaactatgc

SEQ ID NO: 5456 - DNA, 80 bp, Artificial Sequence
  Description of Artificial Sequence: Synthetic oligonucleotide
tgtatgggccgcgctaagtcagccggttcgtcaagtagcatgaccctagctctgcatccccaagccggtcgcaactatgc

SEQ ID NO: 5457 - DNA, 80 bp, Artificial Sequence
  Description of Artificial Sequence: Synthetic oligonucleotide
tgtatgggccgcgctaagtcagccggttcgtcaagtagcaaagacgactgagtacccggtcaagccggtcgcaactatgc

SEQ ID NO: 5458 - DNA, 80 bp, Artificial Sequence
  Description of Artificial Sequence: Synthetic oligonucleotide
tgtatgggccgcgctaagtcagccggttcgtcaagtagcaaccagcgacccacacccaggcaagccggtcgcaactatgc

SEQ ID NO: 5459 - DNA, 80 bp, Artificial Sequence
  Description of Artificial Sequence: Synthetic oligonucleotide
tgtatgggccgcgctaagtcagccggttcgtcaagtagcattacctgtcacactcctggccaagccggtcgcaactatgc

SEQ ID NO: 5460 - DNA, 80 bp, Artificial Sequence
  Description of Artificial Sequence: Synthetic oligonucleotide
tgtatgggccgcgctaagtcagccggttcgtcaagtagcactgtggcaagcaaggttactcaagccggtcgcaactatgc

SEQ ID NO: 5461 - DNA, 80 bp, Artificial Sequence
  Description of Artificial Sequence: Synthetic oligonucleotide
tgtatgggccgcgctaagtcagccggttcgtcaagtagcaacagtagaccctaacagccccaagccggtcgcaactatgc

SEQ ID NO: 5462 - DNA, 80 bp, Artificial Sequence
  Description of Artificial Sequence: Synthetic oligonucleotide
tgtatgggccgcgctaagtcagccggttcgtcaagtagcatgggagtagtgcttcttggtcaagccggtcgcaactatgc

SEQ ID NO: 5463 - DNA, 80 bp, Artificial Sequence
  Description of Artificial Sequence: Synthetic oligonucleotide
tgtatgggccgcgctaagtcagccggttcgtcaagtagcatatctgggagggttctcgtgcaagccggtcgcaactatgc

SEQ ID NO: 5464 - DNA, 80 bp, Artificial Sequence
  Description of Artificial Sequence: Synthetic oligonucleotide
tgtatgggccgcgctaagtcagccggttcgtcaagtagcatgggtgaaaataccggtggacaagccggtcgcaactatgc

SEQ ID NO: 5465 - DNA, 80 bp, Artificial Sequence
  Description of Artificial Sequence: Synthetic oligonucleotide
tgtatgggccgcgctaagtcagccggttcgtcaagtagcaaggatcagaggtgccagagtcaagccggtcgcaactatgc

SEQ ID NO: 5466 - DNA, 80 bp, Artificial Sequence
  Description of Artificial Sequence: Synthetic oligonucleotide
tgtatgggccgcgctaagtcagccggttcgtcaagtagcaagcccacccctggttgagcgcaagccggtcgcaactatgc

SEQ ID NO: 5467 - DNA, 80 bp, Artificial Sequence
  Description of Artificial Sequence: Synthetic oligonucleotide
tgtatgggccgcgctaagtcagccggttcgtcaagtagcaattttcagtggctccgtgtccaagccggtcgcaactatgc

SEQ ID NO: 5468 - DNA, 80 bp, Artificial Sequence
  Description of Artificial Sequence: Synthetic oligonucleotide
tgtatgggccgcgctaagtcagccggttcgtcaagtagcagcccacttggagaggttcatcaagccggtcgcaactatgc

SEQ ID NO: 5469 - DNA, 80 bp, Artificial Sequence
  Description of Artificial Sequence: Synthetic oligonucleotide
tgtatgggccgcgctaagtcagccggttcgtcaagtagcaagtcaggaattcaatgccggcaagccggtcgcaactatgc

SEQ ID NO: 5470 - DNA, 80 bp, Artificial Sequence
  Description of Artificial Sequence: Synthetic oligonucleotide
tgtatgggccgcgctaagtcagccggttcgtcaagtagcagtcagcggacagtgccaactcaagccggtcgcaactatgc

SEQ ID NO: 5471 - DNA, 80 bp, Artificial Sequence
  Description of Artificial Sequence: Synthetic oligonucleotide
tgtatgggccgcgctaagtcagccggttcgtcaagtagcagacaaagtgagtgctgagcgcaagccggtcgcaactatgc

SEQ ID NO: 5472 - DNA, 80 bp, Artificial Sequence
  Description of Artificial Sequence: Synthetic oligonucleotide
tgtatgggccgcgctaagtcagccggttcgtcaagtagcagacaggaggcgctcagggtgcaagccggtcgcaactatgc

SEQ ID NO: 5473 - DNA, 80 bp, Artificial Sequence
  Description of Artificial Sequence: Synthetic oligonucleotide
tgtatgggccgcgctaagtcagccggttcgtcaagtagcattgcagacctgtgaccatgtcaagccggtcgcaactatgc

SEQ ID NO: 5474 - DNA, 80 bp, Artificial Sequence
  Description of Artificial Sequence: Synthetic oligonucleotide
tgtatgggccgcgctaagtcagccggttcgtcaagtagcagtgcctgacagaataggtgccaagccggtcgcaactatgc

SEQ ID NO: 5475 - DNA, 80 bp, Artificial Sequence
  Description of Artificial Sequence: Synthetic oligonucleotide
tgtatgggccgcgctaagtcagccggttcgtcaagtagcaagccaaggtcaaaccgcactcaagccggtcgcaactatgc

SEQ ID NO: 5476 - DNA, 80 bp, Artificial Sequence
  Description of Artificial Sequence: Synthetic oligonucleotide
tgtatgggccgcgctaagtcagccggttcgtcaagtagcacatctctggcctcacacactcaagccggtcgcaactatgc

SEQ ID NO: 5477 - DNA, 80 bp, Artificial Sequence
  Description of Artificial Sequence: Synthetic oligonucleotide
tgtatgggccgcgctaagtcagccggttcgtcaagtagcattccttgtttcttgcccagccaagccggtcgcaactatgc

SEQ ID NO: 5478 - DNA, 80 bp, Artificial Sequence
  Description of Artificial Sequence: Synthetic oligonucleotide
tgtatgggccgcgctaagtcagccggttcgtcaagtagcacaaaagtggctggggctcagcaagccggtcgcaactatgc

SEQ ID NO: 5479 - DNA, 80 bp, Artificial Sequence
  Description of Artificial Sequence: Synthetic oligonucleotide
tgtatgggccgcgctaagtcagccggttcgtcaagtagcaagggcagagtcagctgattacaagccggtcgcaactatgc

SEQ ID NO: 5480 - DNA, 80 bp, Artificial Sequence
  Description of Artificial Sequence: Synthetic oligonucleotide
tgtatgggccgcgctaagtcagccggttcgtcaagtagcaccactcagcaagacttgtcccaagccggtcgcaactatgc

SEQ ID NO: 5481 - DNA, 80 bp, Artificial Sequence
  Description of Artificial Sequence: Synthetic oligonucleotide
tgtatgggccgcgctaagtcagccggttcgtcaagtagcaaccctccactaaaacccagtcaagccggtcgcaactatgc

SEQ ID NO: 5482 - DNA, 80 bp, Artificial Sequence
  Description of Artificial Sequence: Synthetic oligonucleotide
tgtatgggccgcgctaagtcagccggttcgtcaagtagcatattggacccacaaagccaccaagccggtcgcaactatgc

SEQ ID NO: 5483 - DNA, 80 bp, Artificial Sequence
  Description of Artificial Sequence: Synthetic oligonucleotide
tgtatgggccgcgctaagtcagccggttcgtcaagtagcacctggggctagagctctctgcaagccggtcgcaactatgc

SEQ ID NO: 5484 - DNA, 80 bp, Artificial Sequence
  Description of Artificial Sequence: Synthetic oligonucleotide
tgtatgggccgcgctaagtcagccggttcgtcaagtagcataatcaaggggaaggctccacaagccggtcgcaactatgc

SEQ ID NO: 5485 - DNA, 80 bp, Artificial Sequence
  Description of Artificial Sequence: Synthetic oligonucleotide
tgtatgggccgcgctaagtcagccggttcgtcaagtagcaagaagctggccagatgtttgcaagccggtcgcaactatgc

SEQ ID NO: 5486 - DNA, 80 bp, Artificial Sequence
  Description of Artificial Sequence: Synthetic oligonucleotide
tgtatgggccgcgctaagtcagccggttcgtcaagtagcatagtcaggcgtgcacttttgcaagccggtcgcaactatgc

SEQ ID NO: 5487 - DNA, 80 bp, Artificial Sequence
  Description of Artificial Sequence: Synthetic oligonucleotide
tgtatgggccgcgctaagtcagccggttcgtcaagtagcattatcctcaatgccgcaacccaagccggtcgcaactatgc

SEQ ID NO: 5488 - DNA, 80 bp, Artificial Sequence
  Description of Artificial Sequence: Synthetic oligonucleotide
tgtatgggccgcgctaagtcagccggttcgtcaagtagcaccccaggagcctattcagtgcaagccggtcgcaactatgc

SEQ ID NO: 5489 - DNA, 80 bp, Artificial Sequence
  Description of Artificial Sequence: Synthetic oligonucleotide
tgtatgggccgcgctaagtcagccggttcgtcaagtagcattcccttgtgattccacccacaagccggtcgcaactatgc

SEQ ID NO: 5490 - DNA, 80 bp, Artificial Sequence
  Description of Artificial Sequence: Synthetic oligonucleotide
tgtatgggccgcgctaagtcagccggttcgtcaagtagcagtggccaggatcccaaactccaagccggtcgcaactatgc

SEQ ID NO: 5491 - DNA, 80 bp, Artificial Sequence
  Description of Artificial Sequence: Synthetic oligonucleotide
tgtatgggccgcgctaagtcagccggttcgtcaagtagcatgccagtcagtgagatgcatcaagccggtcgcaactatgc

SEQ ID NO: 5492 - DNA, 80 bp, Artificial Sequence
  Description of Artificial Sequence: Synthetic oligonucleotide
tgtatgggccgcgctaagtcagccggttcgtcaagtagcagctgaatggtcctgctatggcaagccggtcgcaactatgc

SEQ ID NO: 5493 - DNA, 80 bp, Artificial Sequence
  Description of Artificial Sequence: Synthetic oligonucleotide
tgtatgggccgcgctaagtcagccggttcgtcaagtagcaaactgccccgatttagacctcaagccggtcgcaactatgc

SEQ ID NO: 5494 - DNA, 80 bp, Artificial Sequence
  Description of Artificial Sequence: Synthetic oligonucleotide
tgtatgggccgcgctaagtcagccggttcgtcaagtagcatcgctgcaactctgttcctccaagccggtcgcaactatgc

SEQ ID NO: 5495 - DNA, 80 bp, Artificial Sequence
  Description of Artificial Sequence: Synthetic oligonucleotide
tgtatgggccgcgctaagtcagccggttcgtcaagtagcaaggatggaagggcgtggtggcaagccggtcgcaactatgc

SEQ ID NO: 5496 - DNA, 80 bp, Artificial Sequence
  Description of Artificial Sequence: Synthetic oligonucleotide
tgtatgggccgcgctaagtcagccggttcgtcaagtagcatgccgaggtgccaggggatccaagccggtcgcaactatgc

SEQ ID NO: 5497 - DNA, 80 bp, Artificial Sequence
  Description of Artificial Sequence: Synthetic oligonucleotide
tgtatgggccgcgctaagtcagccggttcgtcaagtagcaggccaggacctgcttactaacaagccggtcgcaactatgc

SEQ ID NO: 5498 - DNA, 80 bp, Artificial Sequence
  Description of Artificial Sequence: Synthetic oligonucleotide
tgtatgggccgcgctaagtcagccggttcgtcaagtagcaactacgctcagtgagagagccaagccggtcgcaactatgc

SEQ ID NO: 5499 - DNA, 80 bp, Artificial Sequence
  Description of Artificial Sequence: Synthetic oligonucleotide
tgtatgggccgcgctaagtcagccggttcgtcaagtagcatcacagtctgccgtacatcacaagccggtcgcaactatgc

SEQ ID NO: 5500 - DNA, 80 bp, Artificial Sequence
  Description of Artificial Sequence: Synthetic oligonucleotide
tgtatgggccgcgctaagtcagccggttcgtcaagtagcaactcccagatgtttgcctgacaagccggtcgcaactatgc

SEQ ID NO: 5501 - DNA, 80 bp, Artificial Sequence
  Description of Artificial Sequence: Synthetic oligonucleotide
tgtatgggccgcgctaagtcagccggttcgtcaagtagcaagccaagcactctacacactcaagccggtcgcaactatgc

SEQ ID NO: 5502 - DNA, 80 bp, Artificial Sequence
  Description of Artificial Sequence: Synthetic oligonucleotide
tgtatgggccgcgctaagtcagccggttcgtcaagtagcatgtggactcaggcaccatgccaagccggtcgcaactatgc

SEQ ID NO: 5503 - DNA, 80 bp, Artificial Sequence
  Description of Artificial Sequence: Synthetic oligonucleotide
tgtatgggccgcgctaagtcagccggttcgtcaagtagcaggctgtgagtgggctccatacaagccggtcgcaactatgc

SEQ ID NO: 5504 - DNA, 80 bp, Artificial Sequence
  Description of Artificial Sequence: Synthetic oligonucleotide
tgtatgggccgcgctaagtcagccggttcgtcaagtagcaccttattcaggcctgcaaggcaagccggtcgcaactatgc

SEQ ID NO: 5505 - DNA, 80 bp, Artificial Sequence
  Description of Artificial Sequence: Synthetic oligonucleotide
tgtatgggccgcgctaagtcagccggttcgtcaagtagcaagtccggcttctcaggaaatcaagccggtcgcaactatgc

SEQ ID NO: 5506 - DNA, 80 bp, Artificial Sequence
  Description of Artificial Sequence: Synthetic oligonucleotide
tgtatgggccgcgctaagtcagccggttcgtcaagtagcaggtctaaggcagcctcctagcaagccggtcgcaactatgc

SEQ ID NO: 5507 - DNA, 80 bp, Artificial Sequence
  Description of Artificial Sequence: Synthetic oligonucleotide
tgtatgggccgcgctaagtcagccggttcgtcaagtagcatgcctttccacttacccagtcaagccggtcgcaactatgc

SEQ ID NO: 5508 - DNA, 80 bp, Artificial Sequence
  Description of Artificial Sequence: Synthetic oligonucleotide
tgtatgggccgcgctaagtcagccggttcgtcaagtagcatcttcagcttcatgcacacccaagccggtcgcaactatgc

SEQ ID NO: 5509 - DNA, 80 bp, Artificial Sequence
  Description of Artificial Sequence: Synthetic oligonucleotide
tgtatgggccgcgctaagtcagccggttcgtcaagtagcaagcatccgggcttctctggacaagccggtcgcaactatgc

SEQ ID NO: 5510 - DNA, 80 bp, Artificial Sequence
  Description of Artificial Sequence: Synthetic oligonucleotide
tgtatgggccgcgctaagtcagccggttcgtcaagtagcaatgcggagaaacacggttttcaagccggtcgcaactatgc

SEQ ID NO: 5511 - DNA, 80 bp, Artificial Sequence
  Description of Artificial Sequence: Synthetic oligonucleotide
tgtatgggccgcgctaagtcagccggttcgtcaagtagcacagggaagctattggcaaggcaagccggtcgcaactatgc

SEQ ID NO: 5512 - DNA, 80 bp, Artificial Sequence
  Description of Artificial Sequence: Synthetic oligonucleotide
tgtatgggccgcgctaagtcagccggttcgtcaagtagcaccaagctggaatgtgcagagcaagccggtcgcaactatgc

SEQ ID NO: 5513 - DNA, 80 bp, Artificial Sequence
  Description of Artificial Sequence: Synthetic oligonucleotide
tgtatgggccgcgctaagtcagccggttcgtcaagtagcagcaaaggtgcagcacatttgcaagccggtcgcaactatgc

SEQ ID NO: 5514 - DNA, 80 bp, Artificial Sequence
  Description of Artificial Sequence: Synthetic oligonucleotide
tgtatgggccgcgctaagtcagccggttcgtcaagtagcatctgttgggcctagttctgtcaagccggtcgcaactatgc

SEQ ID NO: 5515 - DNA, 80 bp, Artificial Sequence
  Description of Artificial Sequence: Synthetic oligonucleotide
tgtatgggccgcgctaagtcagccggttcgtcaagtagcagaagatgcacagaccacagccaagccggtcgcaactatgc

SEQ ID NO: 5516 - DNA, 80 bp, Artificial Sequence
  Description of Artificial Sequence: Synthetic oligonucleotide
tgtatgggccgcgctaagtcagccggttcgtcaagtagcaagacccaaacttagagggcacaagccggtcgcaactatgc

SEQ ID NO: 5517 - DNA, 80 bp, Artificial Sequence
  Description of Artificial Sequence: Synthetic oligonucleotide
tgtatgggccgcgctaagtcagccggttcgtcaagtagcacctttattgcctgggcttgccaagccggtcgcaactatgc

SEQ ID NO: 5518 - DNA, 80 bp, Artificial Sequence
  Description of Artificial Sequence: Synthetic oligonucleotide
tgtatgggccgcgctaagtcagccggttcgtcaagtagcatcctaacccaaagcctgacacaagccggtcgcaactatgc

SEQ ID NO: 5519 - DNA, 80 bp, Artificial Sequence
  Description of Artificial Sequence: Synthetic oligonucleotide
tgtatgggccgcgctaagtcagccggttcgtcaagtagcactcaaagcagtactctggcgcaagccggtcgcaactatgc

SEQ ID NO: 5520 - DNA, 80 bp, Artificial Sequence
  Description of Artificial Sequence: Synthetic oligonucleotide
tgtatgggccgcgctaagtcagccggttcgtcaagtagcataatttggctccctcctgctcaagccggtcgcaactatgc

SEQ ID NO: 5521 - DNA, 80 bp, Artificial Sequence
  Description of Artificial Sequence: Synthetic oligonucleotide
tgtatgggccgcgctaagtcagccggttcgtcaagtagcatggcatctgaagtaccagggcaagccggtcgcaactatgc

SEQ ID NO: 5522 - DNA, 80 bp, Artificial Sequence
  Description of Artificial Sequence: Synthetic oligonucleotide
tgtatgggccgcgctaagtcagccggttcgtcaagtagcaacaaaggtgatgcacttgcccaagccggtcgcaactatgc

SEQ ID NO: 5523 - DNA, 80 bp, Artificial Sequence
  Description of Artificial Sequence: Synthetic oligonucleotide
tgtatgggccgcgctaagtcagccggttcgtcaagtagcagagtccagaacacgcttggacaagccggtcgcaactatgc

SEQ ID NO: 5524 - DNA, 80 bp, Artificial Sequence
  Description of Artificial Sequence: Synthetic oligonucleotide
tgtatgggccgcgctaagtcagccggttcgtcaagtagcatcagcagatgcggtgatttccaagccggtcgcaactatgc

SEQ ID NO: 5525 - DNA, 80 bp, Artificial Sequence
  Description of Artificial Sequence: Synthetic oligonucleotide
tgtatgggccgcgctaagtcagccggttcgtcaagtagcaagagaagctcttgagaggggcaagccggtcgcaactatgc

SEQ ID NO: 5526 - DNA, 80 bp, Artificial Sequence
  Description of Artificial Sequence: Synthetic oligonucleotide
tgtatgggccgcgctaagtcagccggttcgtcaagtagcaaggaggtgaagcaagtcactcaagccggtcgcaactatgc

SEQ ID NO: 5527 - DNA, 80 bp, Artificial Sequence
  Description of Artificial Sequence: Synthetic oligonucleotide
tgtatgggccgcgctaagtcagccggttcgtcaagtagcaccatgaggggccgcacagcacaagccggtcgcaactatgc

SEQ ID NO: 5528 - DNA, 80 bp, Artificial Sequence
  Description of Artificial Sequence: Synthetic oligonucleotide
tgtatgggccgcgctaagtctgtatgccgagcggttcagtgtcagagaccagttgcgatgcaagccggtcgcaactatgc

SEQ ID NO: 5529 - DNA, 80 bp, Artificial Sequence
  Description of Artificial Sequence: Synthetic oligonucleotide
tgtatgggccgcgctaagtctgtatgccgagcggttcagtagtgggaatgttgtttgggccaagccggtcgcaactatgc

SEQ ID NO: 5530 - DNA, 80 bp, Artificial Sequence
  Description of Artificial Sequence: Synthetic oligonucleotide
tgtatgggccgcgctaagtctgtatgccgagcggttcagtgcaggggccttaccaaagtccaagccggtcgcaactatgc

SEQ ID NO: 5531 - DNA, 80 bp, Artificial Sequence
  Description of Artificial Sequence: Synthetic oligonucleotide
tgtatgggccgcgctaagtctgtatgccgagcggttcagttgttaggaccacatggaccccaagccggtcgcaactatgc

SEQ ID NO: 5532 - DNA, 80 bp, Artificial Sequence
  Description of Artificial Sequence: Synthetic oligonucleotide
tgtatgggccgcgctaagtctgtatgccgagcggttcagtttagctccagaacagggtcccaagccggtcgcaactatgc

SEQ ID NO: 5533 - DNA, 80 bp, Artificial Sequence
  Description of Artificial Sequence: Synthetic oligonucleotide
tgtatgggccgcgctaagtctgtatgccgagcggttcagtagccttgcttcaagatctgccaagccggtcgcaactatgc

SEQ ID NO: 5534 - DNA, 80 bp, Artificial Sequence
  Description of Artificial Sequence: Synthetic oligonucleotide
tgtatgggccgcgctaagtctgtatgccgagcggttcagttagagctgcctgattctgcacaagccggtcgcaactatgc

SEQ ID NO: 5535 - DNA, 80 bp, Artificial Sequence
  Description of Artificial Sequence: Synthetic oligonucleotide
tgtatgggccgcgctaagtctgtatgccgagcggttcagtgcaccaaagcccaaggttttcaagccggtcgcaactatgc

SEQ ID NO: 5536 - DNA, 80 bp, Artificial Sequence
  Description of Artificial Sequence: Synthetic oligonucleotide
tgtatgggccgcgctaagtctgtatgccgagcggttcagttgaagctagctctctcctgccaagccggtcgcaactatgc

SEQ ID NO: 5537 - DNA, 80 bp, Artificial Sequence
  Description of Artificial Sequence: Synthetic oligonucleotide
tgtatgggccgcgctaagtctgtatgccgagcggttcagtccatgggctcttctgggttccaagccggtcgcaactatgc

SEQ ID NO: 5538 - DNA, 80 bp, Artificial Sequence
  Description of Artificial Sequence: Synthetic oligonucleotide
tgtatgggccgcgctaagtctgtatgccgagcggttcagttttcaccgactcaggccagccaagccggtcgcaactatgc

SEQ ID NO: 5539 - DNA, 80 bp, Artificial Sequence
  Description of Artificial Sequence: Synthetic oligonucleotide
tgtatgggccgcgctaagtctgtatgccgagcggttcagtagtccaggcacgatctactccaagccggtcgcaactatgc

SEQ ID NO: 5540 - DNA, 80 bp, Artificial Sequence
  Description of Artificial Sequence: Synthetic oligonucleotide
tgtatgggccgcgctaagtctgtatgccgagcggttcagtggccaatcctaagcgttgcccaagccggtcgcaactatgc

SEQ ID NO: 5541 - DNA, 80 bp, Artificial Sequence
  Description of Artificial Sequence: Synthetic oligonucleotide
tgtatgggccgcgctaagtctgtatgccgagcggttcagtggttgtaaggagatggcagccaagccggtcgcaactatgc

SEQ ID NO: 5542 - DNA, 80 bp, Artificial Sequence
  Description of Artificial Sequence: Synthetic oligonucleotide
tgtatgggccgcgctaagtctgtatgccgagcggttcagtagtgagggtgatttccaggtcaagccggtcgcaactatgc

SEQ ID NO: 5543 - DNA, 80 bp, Artificial Sequence
  Description of Artificial Sequence: Synthetic oligonucleotide
tgtatgggccgcgctaagtctgtatgccgagcggttcagtaagagtcagggtgaggagtccaagccggtcgcaactatgc

SEQ ID NO: 5544 - DNA, 80 bp, Artificial Sequence
  Description of Artificial Sequence: Synthetic oligonucleotide
tgtatgggccgcgctaagtctgtatgccgagcggttcagttcaatgtgacgtgctttggccaagccggtcgcaactatgc

SEQ ID NO: 5545 - DNA, 80 bp, Artificial Sequence
  Description of Artificial Sequence: Synthetic oligonucleotide
tgtatgggccgcgctaagtctgtatgccgagcggttcagtagggaggaagactcaaccagcaagccggtcgcaactatgc

SEQ ID NO: 5546 - DNA, 80 bp, Artificial Sequence
  Description of Artificial Sequence: Synthetic oligonucleotide
tgtatgggccgcgctaagtctgtatgccgagcggttcagtcgggtaggagatcgcagtttcaagccggtcgcaactatgc

SEQ ID NO: 5547 - DNA, 80 bp, Artificial Sequence
  Description of Artificial Sequence: Synthetic oligonucleotide
tgtatgggccgcgctaagtctgtatgccgagcggttcagtaagccccaccggtgtgcccacaagccggtcgcaactatgc

SEQ ID NO: 5548 - DNA, 80 bp, Artificial Sequence
  Description of Artificial Sequence: Synthetic oligonucleotide
tgtatgggccgcgctaagtctgtatgccgagcggttcagtggaagggcacttgtgtaagccaagccggtcgcaactatgc

SEQ ID NO: 5549 - DNA, 80 bp, Artificial Sequence
  Description of Artificial Sequence: Synthetic oligonucleotide
tgtatgggccgcgctaagtctgtatgccgagcggttcagtttttctctacaccggtgccacaagccggtcgcaactatgc

SEQ ID NO: 5550 - DNA, 80 bp, Artificial Sequence
  Description of Artificial Sequence: Synthetic oligonucleotide
tgtatgggccgcgctaagtctgtatgccgagcggttcagtacacaccccttcactcgctgcaagccggtcgcaactatgc

SEQ ID NO: 5551 - DNA, 80 bp, Artificial Sequence
  Description of Artificial Sequence: Synthetic oligonucleotide
tgtatgggccgcgctaagtcagccggttcgtcaagtagcacccataggtcagaaaggggacaagccggtcgcaactatgc

SEQ ID NO: 5552 - DNA, 80 bp, Artificial Sequence
  Description of Artificial Sequence: Synthetic oligonucleotide
tgtatgggccgcgctaagtcagccggttcgtcaagtagcagagatccctacctccgaacccaagccggtcgcaactatgc

SEQ ID NO: 5553 - DNA, 80 bp, Artificial Sequence
  Description of Artificial Sequence: Synthetic oligonucleotide
tgtatgggccgcgctaagtcagccggttcgtcaagtagcaagctctccttgctctcatgccaagccggtcgcaactatgc

SEQ ID NO: 5554 - DNA, 80 bp, Artificial Sequence
  Description of Artificial Sequence: Synthetic oligonucleotide
tgtatgggccgcgctaagtcagccggttcgtcaagtagcatgccatctatcagtgccacacaagccggtcgcaactatgc

SEQ ID NO: 5555 - DNA, 80 bp, Artificial Sequence
  Description of Artificial Sequence: Synthetic oligonucleotide
tgtatgggccgcgctaagtcagccggttcgtcaagtagcatagccccatttgttctccctcaagccggtcgcaactatgc

SEQ ID NO: 5556 - DNA, 80 bp, Artificial Sequence
  Description of Artificial Sequence: Synthetic oligonucleotide
tgtatgggccgcgctaagtcagccggttcgtcaagtagcaacaggggaccacttaactgccaagccggtcgcaactatgc

SEQ ID NO: 5557 - DNA, 80 bp, Artificial Sequence
  Description of Artificial Sequence: Synthetic oligonucleotide
tgtatgggccgcgctaagtcagccggttcgtcaagtagcaaggatagaggcctgctacagcaagccggtcgcaactatgc

SEQ ID NO: 5558 - DNA, 80 bp, Artificial Sequence
  Description of Artificial Sequence: Synthetic oligonucleotide
tgtatgggccgcgctaagtcagccggttcgtcaagtagcatctcagatgtcactcgcacccaagccggtcgcaactatgc

SEQ ID NO: 5559 - DNA, 80 bp, Artificial Sequence
  Description of Artificial Sequence: Synthetic oligonucleotide
tgtatgggccgcgctaagtcagccggttcgtcaagtagcattgggaaacactacctgcctcaagccggtcgcaactatgc

SEQ ID NO: 5560 - DNA, 80 bp, Artificial Sequence
  Description of Artificial Sequence: Synthetic oligonucleotide
tgtatgggccgcgctaagtcagccggttcgtcaagtagcattgcaagaatgttggctccacaagccggtcgcaactatgc

SEQ ID NO: 5561 - DNA, 80 bp, Artificial Sequence
  Description of Artificial Sequence: Synthetic oligonucleotide
tgtatgggccgcgctaagtcagccggttcgtcaagtagcatgggccatcactcctgtctacaagccggtcgcaactatgc

SEQ ID NO: 5562 - DNA, 80 bp, Artificial Sequence
  Description of Artificial Sequence: Synthetic oligonucleotide
tgtatgggccgcgctaagtcagccggttcgtcaagtagcaccaccttccgacaggccccacaagccggtcgcaactatgc

SEQ ID NO: 5563 - DNA, 80 bp, Artificial Sequence
  Description of Artificial Sequence: Synthetic oligonucleotide
tgtatgggccgcgctaagtcagccggttcgtcaagtagcaacaagacctctggaatggcacaagccggtcgcaactatgc

SEQ ID NO: 5564 - DNA, 80 bp, Artificial Sequence
  Description of Artificial Sequence: Synthetic oligonucleotide
tgtatgggccgcgctaagtcagccggttcgtcaagtagcatgaatggagaggcaacaagccaagccggtcgcaactatgc

SEQ ID NO: 5565 - DNA, 80 bp, Artificial Sequence
  Description of Artificial Sequence: Synthetic oligonucleotide
tgtatgggccgcgctaagtcagccggttcgtcaagtagcaccaaagggattgaggagggacaagccggtcgcaactatgc

SEQ ID NO: 5566 - DNA, 80 bp, Artificial Sequence
  Description of Artificial Sequence: Synthetic oligonucleotide
tgtatgggccgcgctaagtcagccggttcgtcaagtagcaccacaagttggctatgcacacaagccggtcgcaactatgc

SEQ ID NO: 5567 - DNA, 80 bp, Artificial Sequence
  Description of Artificial Sequence: Synthetic oligonucleotide
tgtatgggccgcgctaagtcagccggttcgtcaagtagcactggaacctaggcctgagggcaagccggtcgcaactatgc

SEQ ID NO: 5568 - DNA, 80 bp, Artificial Sequence
  Description of Artificial Sequence: Synthetic oligonucleotide
tgtatgggccgcgctaagtcagccggttcgtcaagtagcatccagtcagacagaagcagtcaagccggtcgcaactatgc

SEQ ID NO: 5569 - DNA, 80 bp, Artificial Sequence
  Description of Artificial Sequence: Synthetic oligonucleotide
tgtatgggccgcgctaagtcagccggttcgtcaagtagcatttgcaaggttgtctcaccccaagccggtcgcaactatgc

SEQ ID NO: 5570 - DNA, 80 bp, Artificial Sequence
  Description of Artificial Sequence: Synthetic oligonucleotide
tgtatgggccgcgctaagtcagccggttcgtcaagtagcaatagacactgggctcttggtcaagccggtcgcaactatgc

SEQ ID NO: 5571 - DNA, 80 bp, Artificial Sequence
  Description of Artificial Sequence: Synthetic oligonucleotide
tgtatgggccgcgctaagtcagccggttcgtcaagtagcattggggtttgtgccttctgacaagccggtcgcaactatgc

SEQ ID NO: 5572 - DNA, 80 bp, Artificial Sequence
  Description of Artificial Sequence: Synthetic oligonucleotide
tgtatgggccgcgctaagtcagccggttcgtcaagtagcattgtcaacatttgctgccgtcaagccggtcgcaactatgc

SEQ ID NO: 5573 - DNA, 80 bp, Artificial Sequence
  Description of Artificial Sequence: Synthetic oligonucleotide
tgtatgggccgcgctaagtcagccggttcgtcaagtagcatctaacagaggggcaaaggacaagccggtcgcaactatgc

SEQ ID NO: 5574 - DNA, 80 bp, Artificial Sequence
  Description of Artificial Sequence: Synthetic oligonucleotide
tgtatgggccgcgctaagtcagccggttcgtcaagtagcagggagttaggactagtggcacaagccggtcgcaactatgc

SEQ ID NO: 5575 - DNA, 80 bp, Artificial Sequence
  Description of Artificial Sequence: Synthetic oligonucleotide
tgtatgggccgcgctaagtcagccggttcgtcaagtagcagtgctgggagatggccatctcaagccggtcgcaactatgc

SEQ ID NO: 5576 - DNA, 80 bp, Artificial Sequence
  Description of Artificial Sequence: Synthetic oligonucleotide
tgtatgggccgcgctaagtcagccggttcgtcaagtagcaagggagtactgaacctgctccaagccggtcgcaactatgc

SEQ ID NO: 5577 - DNA, 80 bp, Artificial Sequence
  Description of Artificial Sequence: Synthetic oligonucleotide
tgtatgggccgcgctaagtcagccggttcgtcaagtagcatgtcctgaagcacactacctcaagccggtcgcaactatgc

SEQ ID NO: 5578 - DNA, 80 bp, Artificial Sequence
  Description of Artificial Sequence: Synthetic oligonucleotide
tgtatgggccgcgctaagtcagccggttcgtcaagtagcaggaaagagtgtcccaggtcccaagccggtcgcaactatgc

SEQ ID NO: 5579 - DNA, 80 bp, Artificial Sequence
  Description of Artificial Sequence: Synthetic oligonucleotide
tgtatgggccgcgctaagtcagccggttcgtcaagtagcaatgcaggtgttttcaggcatcaagccggtcgcaactatgc

SEQ ID NO: 5580 - DNA, 80 bp, Artificial Sequence
  Description of Artificial Sequence: Synthetic oligonucleotide
tgtatgggccgcgctaagtcagccggttcgtcaagtagcatggactttggtcgcacaaatcaagccggtcgcaactatgc

SEQ ID NO: 5581 - DNA, 80 bp, Artificial Sequence
  Description of Artificial Sequence: Synthetic oligonucleotide
tgtatgggccgcgctaagtcagccggttcgtcaagtagcatctgcgttggagttctcagacaagccggtcgcaactatgc

SEQ ID NO: 5582 - DNA, 80 bp, Artificial Sequence
  Description of Artificial Sequence: Synthetic oligonucleotide
tgtatgggccgcgctaagtcagccggttcgtcaagtagcatctcaatgacttgggtggcacaagccggtcgcaactatgc

SEQ ID NO: 5583 - DNA, 80 bp, Artificial Sequence
  Description of Artificial Sequence: Synthetic oligonucleotide
tgtatgggccgcgctaagtcagccggttcgtcaagtagcaagggctgaaggaatgcaacacaagccggtcgcaactatgc

SEQ ID NO: 5584 - DNA, 80 bp, Artificial Sequence
  Description of Artificial Sequence: Synthetic oligonucleotide
tgtatgggccgcgctaagtcagccggttcgtcaagtagcaagccaaaacttcccacgagacaagccggtcgcaactatgc

SEQ ID NO: 5585 - DNA, 80 bp, Artificial Sequence
  Description of Artificial Sequence: Synthetic oligonucleotide
tgtatgggccgcgctaagtcagccggttcgtcaagtagcaaaaatgccttccatgaggggcaagccggtcgcaactatgc

SEQ ID NO: 5586 - DNA, 80 bp, Artificial Sequence
  Description of Artificial Sequence: Synthetic oligonucleotide
tgtatgggccgcgctaagtcagccggttcgtcaagtagcaaagctagtggcattcacagccaagccggtcgcaactatgc

SEQ ID NO: 5587 - DNA, 80 bp, Artificial Sequence
  Description of Artificial Sequence: Synthetic oligonucleotide
tgtatgggccgcgctaagtcagccggttcgtcaagtagcagcccgaggacgacaccatctcaagccggtcgcaactatgc

SEQ ID NO: 5588 - DNA, 80 bp, Artificial Sequence
  Description of Artificial Sequence: Synthetic oligonucleotide
tgtatgggccgcgctaagtcagccggttcgtcaagtagcaagtcggccatttcttctccccaagccggtcgcaactatgc

SEQ ID NO: 5589 - DNA, 80 bp, Artificial Sequence
  Description of Artificial Sequence: Synthetic oligonucleotide
tgtatgggccgcgctaagtcagccggttcgtcaagtagcatgctccgaagtgccattaaccaagccggtcgcaactatgc

SEQ ID NO: 5590 - DNA, 80 bp, Artificial Sequence
  Description of Artificial Sequence: Synthetic oligonucleotide
tgtatgggccgcgctaagtcagccggttcgtcaagtagcagtgtggaggttaaggagggccaagccggtcgcaactatgc

SEQ ID NO: 5591 - DNA, 80 bp, Artificial Sequence
  Description of Artificial Sequence: Synthetic oligonucleotide
tgtatgggccgcgctaagtcagccggttcgtcaagtagcaaccagctagggaaatggtcacaagccggtcgcaactatgc

SEQ ID NO: 5592 - DNA, 80 bp, Artificial Sequence
  Description of Artificial Sequence: Synthetic oligonucleotide
tgtatgggccgcgctaagtcagccggttcgtcaagtagcatagctcagggtcaggaatggcaagccggtcgcaactatgc

SEQ ID NO: 5593 - DNA, 80 bp, Artificial Sequence
  Description of Artificial Sequence: Synthetic oligonucleotide
tgtatgggccgcgctaagtcagccggttcgtcaagtagcatgaacaacctacaccctgggcaagccggtcgcaactatgc

SEQ ID NO: 5594 - DNA, 80 bp, Artificial Sequence
  Description of Artificial Sequence: Synthetic oligonucleotide
tgtatgggccgcgctaagtcagccggttcgtcaagtagcatggacacctcaaactgcactcaagccggtcgcaactatgc

SEQ ID NO: 5595 - DNA, 80 bp, Artificial Sequence
  Description of Artificial Sequence: Synthetic oligonucleotide
tgtatgggccgcgctaagtcagccggttcgtcaagtagcatgtgcagagaaagtagggctcaagccggtcgcaactatgc

SEQ ID NO: 5596 - DNA, 80 bp, Artificial Sequence
  Description of Artificial Sequence: Synthetic oligonucleotide
tgtatgggccgcgctaagtcagccggttcgtcaagtagcatttcagccgtgaggtctactcaagccggtcgcaactatgc

SEQ ID NO: 5597 - DNA, 80 bp, Artificial Sequence
  Description of Artificial Sequence: Synthetic oligonucleotide
tgtatgggccgcgctaagtcagccggttcgtcaagtagcatcatggccattacttccccacaagccggtcgcaactatgc

SEQ ID NO: 5598 - DNA, 80 bp, Artificial Sequence
  Description of Artificial Sequence: Synthetic oligonucleotide
tgtatgggccgcgctaagtcagccggttcgtcaagtagcacctagttctgccgctcactccaagccggtcgcaactatgc

SEQ ID NO: 5599 - DNA, 80 bp, Artificial Sequence
  Description of Artificial Sequence: Synthetic oligonucleotide
tgtatgggccgcgctaagtcagccggttcgtcaagtagcaaaggcttgcaaatctccacgcaagccggtcgcaactatgc

SEQ ID NO: 5600 - DNA, 80 bp, Artificial Sequence
  Description of Artificial Sequence: Synthetic oligonucleotide
tgtatgggccgcgctaagtcagccggttcgtcaagtagcatgcacactggcagtgacagtcaagccggtcgcaactatgc

SEQ ID NO: 5601 - DNA, 80 bp, Artificial Sequence
  Description of Artificial Sequence: Synthetic oligonucleotide
tgtatgggccgcgctaagtcagccggttcgtcaagtagcacatacaccaaaggcaccaggcaagccggtcgcaactatgc

SEQ ID NO: 5602 - DNA, 80 bp, Artificial Sequence
  Description of Artificial Sequence: Synthetic oligonucleotide
tgtatgggccgcgctaagtcagccggttcgtcaagtagcatttccaacaaaggggtggggcaagccggtcgcaactatgc

SEQ ID NO: 5603 - DNA, 80 bp, Artificial Sequence
  Description of Artificial Sequence: Synthetic oligonucleotide
tgtatgggccgcgctaagtcagccggttcgtcaagtagcagcccaaacagtaaatggcctcaagccggtcgcaactatgc

SEQ ID NO: 5604 - DNA, 80 bp, Artificial Sequence
  Description of Artificial Sequence: Synthetic oligonucleotide
tgtatgggccgcgctaagtcagccggttcgtcaagtagcaatgtgggcactagatcaggtcaagccggtcgcaactatgc

SEQ ID NO: 5605 - DNA, 80 bp, Artificial Sequence
  Description of Artificial Sequence: Synthetic oligonucleotide
tgtatgggccgcgctaagtcagccggttcgtcaagtagcaaggcttgagtctggggctatcaagccggtcgcaactatgc

SEQ ID NO: 5606 - DNA, 80 bp, Artificial Sequence
  Description of Artificial Sequence: Synthetic oligonucleotide
tgtatgggccgcgctaagtcagccggttcgtcaagtagcaagagtgtcagagtacgcctgcaagccggtcgcaactatgc

SEQ ID NO: 5607 - DNA, 80 bp, Artificial Sequence
  Description of Artificial Sequence: Synthetic oligonucleotide
tgtatgggccgcgctaagtcagccggttcgtcaagtagcaaggggactggaatatgcacccaagccggtcgcaactatgc

SEQ ID NO: 5608 - DNA, 80 bp, Artificial Sequence
  Description of Artificial Sequence: Synthetic oligonucleotide
tgtatgggccgcgctaagtcagccggttcgtcaagtagcatgacttctgcagccaaacaccaagccggtcgcaactatgc

SEQ ID NO: 5609 - DNA, 80 bp, Artificial Sequence
  Description of Artificial Sequence: Synthetic oligonucleotide
tgtatgggccgcgctaagtcagccggttcgtcaagtagcaaggctgggttatgaattgcccaagccggtcgcaactatgc

SEQ ID NO: 5610 - DNA, 80 bp, Artificial Sequence
  Description of Artificial Sequence: Synthetic oligonucleotide
tgtatgggccgcgctaagtcagccggttcgtcaagtagcaggcccatagtcccactgagccaagccggtcgcaactatgc

SEQ ID NO: 5611 - DNA, 80 bp, Artificial Sequence
  Description of Artificial Sequence: Synthetic oligonucleotide
tgtatgggccgcgctaagtcagccggttcgtcaagtagcattggggtaaagtttggcagccaagccggtcgcaactatgc

SEQ ID NO: 5612 - DNA, 80 bp, Artificial Sequence
  Description of Artificial Sequence: Synthetic oligonucleotide
tgtatgggccgcgctaagtcagccggttcgtcaagtagcactcccacacttgcctttgcccaagccggtcgcaactatgc

SEQ ID NO: 5613 - DNA, 80 bp, Artificial Sequence
  Description of Artificial Sequence: Synthetic oligonucleotide
tgtatgggccgcgctaagtcagccggttcgtcaagtagcactaaccacctcacgcagctgcaagccggtcgcaactatgc

SEQ ID NO: 5614 - DNA, 80 bp, Artificial Sequence
  Description of Artificial Sequence: Synthetic oligonucleotide
tgtatgggccgcgctaagtcagccggttcgtcaagtagcagtaaaccctcctgtcatgcccaagccggtcgcaactatgc

SEQ ID NO: 5615 - DNA, 80 bp, Artificial Sequence
  Description of Artificial Sequence: Synthetic oligonucleotide
tgtatgggccgcgctaagtcagccggttcgtcaagtagcaagttggcggagctcactttacaagccggtcgcaactatgc

SEQ ID NO: 5616 - DNA, 80 bp, Artificial Sequence
  Description of Artificial Sequence: Synthetic oligonucleotide
tgtatgggccgcgctaagtcagccggttcgtcaagtagcaagttgtggtattaggggcggcaagccggtcgcaactatgc

SEQ ID NO: 5617 - DNA, 80 bp, Artificial Sequence
  Description of Artificial Sequence: Synthetic oligonucleotide
tgtatgggccgcgctaagtcagccggttcgtcaagtagcatttcaggggcacgacataggcaagccggtcgcaactatgc

SEQ ID NO: 5618 - DNA, 80 bp, Artificial Sequence
  Description of Artificial Sequence: Synthetic oligonucleotide
tgtatgggccgcgctaagtcagccggttcgtcaagtagcaaaaagggttgagggcaaacacaagccggtcgcaactatgc

SEQ ID NO: 5619 - DNA, 80 bp, Artificial Sequence
  Description of Artificial Sequence: Synthetic oligonucleotide
tgtatgggccgcgctaagtcagccggttcgtcaagtagcatacatcgacaggtacgggtgcaagccggtcgcaactatgc

SEQ ID NO: 5620 - DNA, 80 bp, Artificial Sequence
  Description of Artificial Sequence: Synthetic oligonucleotide
tgtatgggccgcgctaagtcagccggttcgtcaagtagcaaagacagggaggtgcaatctcaagccggtcgcaactatgc

SEQ ID NO: 5621 - DNA, 80 bp, Artificial Sequence
  Description of Artificial Sequence: Synthetic oligonucleotide
tgtatgggccgcgctaagtcagccggttcgtcaagtagcagtcaagctgctgaggccaatcaagccggtcgcaactatgc

SEQ ID NO: 5622 - DNA, 80 bp, Artificial Sequence
  Description of Artificial Sequence: Synthetic oligonucleotide
tgtatgggccgcgctaagtcagccggttcgtcaagtagcaaaccaggctgcacacacgtgcaagccggtcgcaactatgc

SEQ ID NO: 5623 - DNA, 80 bp, Artificial Sequence
  Description of Artificial Sequence: Synthetic oligonucleotide
tgtatgggccgcgctaagtcagccggttcgtcaagtagcatcatccaagcactacggagccaagccggtcgcaactatgc

SEQ ID NO: 5624 - DNA, 80 bp, Artificial Sequence
  Description of Artificial Sequence: Synthetic oligonucleotide
tgtatgggccgcgctaagtcagccggttcgtcaagtagcatgtcccagcttagtcccagtcaagccggtcgcaactatgc

SEQ ID NO: 5625 - DNA, 80 bp, Artificial Sequence
  Description of Artificial Sequence: Synthetic oligonucleotide
tgtatgggccgcgctaagtcagccggttcgtcaagtagcagctcatggggatcagtgagtcaagccggtcgcaactatgc

SEQ ID NO: 5626 - DNA, 80 bp, Artificial Sequence
  Description of Artificial Sequence: Synthetic oligonucleotide
tgtatgggccgcgctaagtcagccggttcgtcaagtagcaatactccaacccgctctgaccaagccggtcgcaactatgc

SEQ ID NO: 5627 - DNA, 80 bp, Artificial Sequence
  Description of Artificial Sequence: Synthetic oligonucleotide
tgtatgggccgcgctaagtcagccggttcgtcaagtagcagaggcactgatacattccgccaagccggtcgcaactatgc

SEQ ID NO: 5628 - DNA, 80 bp, Artificial Sequence
  Description of Artificial Sequence: Synthetic oligonucleotide
tgtatgggccgcgctaagtcagccggttcgtcaagtagcaaacaccaggggttctcagttcaagccggtcgcaactatgc

SEQ ID NO: 5629 - DNA, 80 bp, Artificial Sequence
  Description of Artificial Sequence: Synthetic oligonucleotide
tgtatgggccgcgctaagtcagccggttcgtcaagtagcactttgaaccacctgtgagcccaagccggtcgcaactatgc

SEQ ID NO: 5630 - DNA, 80 bp, Artificial Sequence
  Description of Artificial Sequence: Synthetic oligonucleotide
tgtatgggccgcgctaagtcagccggttcgtcaagtagcaaggtatggcatccagttcctcaagccggtcgcaactatgc

SEQ ID NO: 5631 - DNA, 80 bp, Artificial Sequence
  Description of Artificial Sequence: Synthetic oligonucleotide
tgtatgggccgcgctaagtctgtatgccgagcggttcagttgagtgcaccctaagatgggcaagccggtcgcaactatgc

SEQ ID NO: 5632 - DNA, 80 bp, Artificial Sequence
  Description of Artificial Sequence: Synthetic oligonucleotide
tgtatgggccgcgctaagtctgtatgccgagcggttcagtcacctgaaattctggccccacaagccggtcgcaactatgc

SEQ ID NO: 5633 - DNA, 80 bp, Artificial Sequence
  Description of Artificial Sequence: Synthetic oligonucleotide
tgtatgggccgcgctaagtctgtatgccgagcggttcagttcctggcaatgtctgtctcccaagccggtcgcaactatgc

SEQ ID NO: 5634 - DNA, 80 bp, Artificial Sequence
  Description of Artificial Sequence: Synthetic oligonucleotide
tgtatgggccgcgctaagtctgtatgccgagcggttcagttgggacatcggaatccatctcaagccggtcgcaactatgc

SEQ ID NO: 5635 - DNA, 80 bp, Artificial Sequence
  Description of Artificial Sequence: Synthetic oligonucleotide
tgtatgggccgcgctaagtctgtatgccgagcggttcagttgtcccagataccgaacaggcaagccggtcgcaactatgc

SEQ ID NO: 5636 - DNA, 80 bp, Artificial Sequence
  Description of Artificial Sequence: Synthetic oligonucleotide
tgtatgggccgcgctaagtctgtatgccgagcggttcagtaggtggaatctccgcaagtacaagccggtcgcaactatgc

SEQ ID NO: 5637 - DNA, 80 bp, Artificial Sequence
  Description of Artificial Sequence: Synthetic oligonucleotide
tgtatgggccgcgctaagtctgtatgccgagcggttcagtttcagggcatattggcaagccaagccggtcgcaactatgc

SEQ ID NO: 5638 - DNA, 80 bp, Artificial Sequence
  Description of Artificial Sequence: Synthetic oligonucleotide
tgtatgggccgcgctaagtctgtatgccgagcggttcagtacccatactatgccgccttgcaagccggtcgcaactatgc

SEQ ID NO: 5639 - DNA, 80 bp, Artificial Sequence
  Description of Artificial Sequence: Synthetic oligonucleotide
tgtatgggccgcgctaagtctgtatgccgagcggttcagtgtcccctcccaatgctctaacaagccggtcgcaactatgc

SEQ ID NO: 5640 - DNA, 80 bp, Artificial Sequence
  Description of Artificial Sequence: Synthetic oligonucleotide
tgtatgggccgcgctaagtctgtatgccgagcggttcagtgaccacagacacggggaattcaagccggtcgcaactatgc

SEQ ID NO: 5641 - DNA, 80 bp, Artificial Sequence
  Description of Artificial Sequence: Synthetic oligonucleotide
tgtatgggccgcgctaagtctgtatgccgagcggttcagtaatctcgggtgaagaaggcacaagccggtcgcaactatgc

SEQ ID NO: 5642 - DNA, 80 bp, Artificial Sequence
  Description of Artificial Sequence: Synthetic oligonucleotide
tgtatgggccgcgctaagtctgtatgccgagcggttcagtaacacaatgaccaatgggcacaagccggtcgcaactatgc

SEQ ID NO: 5643 - DNA, 80 bp, Artificial Sequence
  Description of Artificial Sequence: Synthetic oligonucleotide
tgtatgggccgcgctaagtctgtatgccgagcggttcagtaggccaaaacagtgaccaaacaagccggtcgcaactatgc

SEQ ID NO: 5644 - DNA, 80 bp, Artificial Sequence
  Description of Artificial Sequence: Synthetic oligonucleotide
tgtatgggccgcgctaagtctgtatgccgagcggttcagtaggttggcttttgacatgctcaagccggtcgcaactatgc

SEQ ID NO: 5645 - DNA, 80 bp, Artificial Sequence
  Description of Artificial Sequence: Synthetic oligonucleotide
tgtatgggccgcgctaagtctgtatgccgagcggttcagtttagcggtggcaagcaatggcaagccggtcgcaactatgc

SEQ ID NO: 5646 - DNA, 80 bp, Artificial Sequence
  Description of Artificial Sequence: Synthetic oligonucleotide
tgtatgggccgcgctaagtctgtatgccgagcggttcagtgcagatctcacattgggcctcaagccggtcgcaactatgc

SEQ ID NO: 5647 - DNA, 80 bp, Artificial Sequence
  Description of Artificial Sequence: Synthetic oligonucleotide
tgtatgggccgcgctaagtctgtatgccgagcggttcagtaggttgctggtcatttccaccaagccggtcgcaactatgc

SEQ ID NO: 5648 - DNA, 80 bp, Artificial Sequence
  Description of Artificial Sequence: Synthetic oligonucleotide
tgtatgggccgcgctaagtctgtatgccgagcggttcagtaagcaagaaaggttgtggcacaagccggtcgcaactatgc

SEQ ID NO: 5649 - DNA, 80 bp, Artificial Sequence
  Description of Artificial Sequence: Synthetic oligonucleotide
tgtatgggccgcgctaagtctgtatgccgagcggttcagttctcctttcgctctcaaccccaagccggtcgcaactatgc

SEQ ID NO: 5650 - DNA, 80 bp, Artificial Sequence
  Description of Artificial Sequence: Synthetic oligonucleotide
tgtatgggccgcgctaagtctgtatgccgagcggttcagtcacgctctggactatcccaacaagccggtcgcaactatgc

SEQ ID NO: 5651 - DNA, 80 bp, Artificial Sequence
  Description of Artificial Sequence: Synthetic oligonucleotide
tgtatgggccgcgctaagtctgtatgccgagcggttcagtgtgccgcagatttcgggttccaagccggtcgcaactatgc

SEQ ID NO: 5652 - DNA, 80 bp, Artificial Sequence
  Description of Artificial Sequence: Synthetic oligonucleotide
tgtatgggccgcgctaagtctgtatgccgagcggttcagtgtctgtggcggtagaaagggcaagccggtcgcaactatgc

SEQ ID NO: 5653 - DNA, 80 bp, Artificial Sequence
  Description of Artificial Sequence: Synthetic oligonucleotide
tgtatgggccgcgctaagtctgtatgccgagcggttcagttgcaggcttgtctcctaactcaagccggtcgcaactatgc

SEQ ID NO: 5654 - DNA, 80 bp, Artificial Sequence
  Description of Artificial Sequence: Synthetic oligonucleotide
tgtatgggccgcgctaagtctgtatgccgagcggttcagtttggggatgtgtgcatttgccaagccggtcgcaactatgc

SEQ ID NO: 5655 - DNA, 80 bp, Artificial Sequence
  Description of Artificial Sequence: Synthetic oligonucleotide
tgtatgggccgcgctaagtctgtatgccgagcggttcagtaggagtcaacccgtgaaagccaagccggtcgcaactatgc

SEQ ID NO: 5656 - DNA, 80 bp, Artificial Sequence
  Description of Artificial Sequence: Synthetic oligonucleotide
tgtatgggccgcgctaagtctgtatgccgagcggttcagtggaggagcccatgacacaggcaagccggtcgcaactatgc

SEQ ID NO: 5657 - DNA, 80 bp, Artificial Sequence
  Description of Artificial Sequence: Synthetic oligonucleotide
tgtatgggccgcgctaagtctgtatgccgagcggttcagtgggactaggatggagactggcaagccggtcgcaactatgc

SEQ ID NO: 5658 - DNA, 80 bp, Artificial Sequence
  Description of Artificial Sequence: Synthetic oligonucleotide
tgtatgggccgcgctaagtctgtatgccgagcggttcagttccaaggcatctttgtgagccaagccggtcgcaactatgc

SEQ ID NO: 5659 - DNA, 80 bp, Artificial Sequence
  Description of Artificial Sequence: Synthetic oligonucleotide
tgtatgggccgcgctaagtctgtatgccgagcggttcagttctcctggccaagtcaacttcaagccggtcgcaactatgc

SEQ ID NO: 5660 - DNA, 80 bp, Artificial Sequence
  Description of Artificial Sequence: Synthetic oligonucleotide
tgtatgggccgcgctaagtctgtatgccgagcggttcagtgcccactgactaccacatgacaagccggtcgcaactatgc

SEQ ID NO: 5661 - DNA, 80 bp, Artificial Sequence
  Description of Artificial Sequence: Synthetic oligonucleotide
tgtatgggccgcgctaagtctgtatgccgagcggttcagtgacacaacattccaggcactcaagccggtcgcaactatgc

SEQ ID NO: 5662 - DNA, 80 bp, Artificial Sequence
  Description of Artificial Sequence: Synthetic oligonucleotide
tgtatgggccgcgctaagtcagccggttcgtcaagtagcaagttcactactccctggctccaagccggtcgcaactatgc

SEQ ID NO: 5663 - DNA, 80 bp, Artificial Sequence
  Description of Artificial Sequence: Synthetic oligonucleotide
tgtatgggccgcgctaagtcagccggttcgtcaagtagcaacagtgacaggaccagttcacaagccggtcgcaactatgc

SEQ ID NO: 5664 - DNA, 80 bp, Artificial Sequence
  Description of Artificial Sequence: Synthetic oligonucleotide
tgtatgggccgcgctaagtcagccggttcgtcaagtagcaaagtagaggtgtggaggcagcaagccggtcgcaactatgc

SEQ ID NO: 5665 - DNA, 80 bp, Artificial Sequence
  Description of Artificial Sequence: Synthetic oligonucleotide
tgtatgggccgcgctaagtcagccggttcgtcaagtagcaggctaccctcagaaacagggcaagccggtcgcaactatgc

SEQ ID NO: 5666 - DNA, 80 bp, Artificial Sequence
  Description of Artificial Sequence: Synthetic oligonucleotide
tgtatgggccgcgctaagtcagccggttcgtcaagtagcatcctcctcagctcagtaacccaagccggtcgcaactatgc

SEQ ID NO: 5667 - DNA, 80 bp, Artificial Sequence
  Description of Artificial Sequence: Synthetic oligonucleotide
tgtatgggccgcgctaagtcagccggttcgtcaagtagcaggagaccttgggaacatcggcaagccggtcgcaactatgc

SEQ ID NO: 5668 - DNA, 80 bp, Artificial Sequence
  Description of Artificial Sequence: Synthetic oligonucleotide
tgtatgggccgcgctaagtcagccggttcgtcaagtagcaaccccgaagtgtgaatctgacaagccggtcgcaactatgc

SEQ ID NO: 5669 - DNA, 80 bp, Artificial Sequence
  Description of Artificial Sequence: Synthetic oligonucleotide
tgtatgggccgcgctaagtcagccggttcgtcaagtagcaggttgaggcttggtaggttgcaagccggtcgcaactatgc

SEQ ID NO: 5670 - DNA, 80 bp, Artificial Sequence
  Description of Artificial Sequence: Synthetic oligonucleotide
tgtatgggccgcgctaagtcagccggttcgtcaagtagcaggggattcacaaacaccaggcaagccggtcgcaactatgc

SEQ ID NO: 5671 - DNA, 80 bp, Artificial Sequence
  Description of Artificial Sequence: Synthetic oligonucleotide
tgtatgggccgcgctaagtcagccggttcgtcaagtagcatctgtggagtatggggatgccaagccggtcgcaactatgc

SEQ ID NO: 5672 - DNA, 80 bp, Artificial Sequence
  Description of Artificial Sequence: Synthetic oligonucleotide
tgtatgggccgcgctaagtcagccggttcgtcaagtagcacacgtgggctgatctctgttcaagccggtcgcaactatgc

SEQ ID NO: 5673 - DNA, 80 bp, Artificial Sequence
  Description of Artificial Sequence: Synthetic oligonucleotide
tgtatgggccgcgctaagtcagccggttcgtcaagtagcaacctactagcaccttccacccaagccggtcgcaactatgc

SEQ ID NO: 5674 - DNA, 80 bp, Artificial Sequence
  Description of Artificial Sequence: Synthetic oligonucleotide
tgtatgggccgcgctaagtcagccggttcgtcaagtagcaagggactgcctgtgttagaacaagccggtcgcaactatgc

SEQ ID NO: 5675 - DNA, 80 bp, Artificial Sequence
  Description of Artificial Sequence: Synthetic oligonucleotide
tgtatgggccgcgctaagtcagccggttcgtcaagtagcaaccaaaatgtcccaagccttcaagccggtcgcaactatgc

SEQ ID NO: 5676 - DNA, 80 bp, Artificial Sequence
  Description of Artificial Sequence: Synthetic oligonucleotide
tgtatgggccgcgctaagtcagccggttcgtcaagtagcaccctgctctggacttactgacaagccggtcgcaactatgc

SEQ ID NO: 5677 - DNA, 80 bp, Artificial Sequence
  Description of Artificial Sequence: Synthetic oligonucleotide
tgtatgggccgcgctaagtcagccggttcgtcaagtagcatagtttccagcggtgagactcaagccggtcgcaactatgc

SEQ ID NO: 5678 - DNA, 80 bp, Artificial Sequence
  Description of Artificial Sequence: Synthetic oligonucleotide
tgtatgggccgcgctaagtcagccggttcgtcaagtagcacatcacctaaaagcagccgccaagccggtcgcaactatgc

SEQ ID NO: 5679 - DNA, 80 bp, Artificial Sequence
  Description of Artificial Sequence: Synthetic oligonucleotide
tgtatgggccgcgctaagtcagccggttcgtcaagtagcaagctcagagaggggtcaagacaagccggtcgcaactatgc

SEQ ID NO: 5680 - DNA, 80 bp, Artificial Sequence
  Description of Artificial Sequence: Synthetic oligonucleotide
tgtatgggccgcgctaagtcagccggttcgtcaagtagcaaggtgggtttgtggtttcaccaagccggtcgcaactatgc

SEQ ID NO: 5681 - DNA, 80 bp, Artificial Sequence
  Description of Artificial Sequence: Synthetic oligonucleotide
tgtatgggccgcgctaagtcagccggttcgtcaagtagcagaggcaatccagctgcaatgcaagccggtcgcaactatgc

SEQ ID NO: 5682 - DNA, 80 bp, Artificial Sequence
  Description of Artificial Sequence: Synthetic oligonucleotide
tgtatgggccgcgctaagtcagccggttcgtcaagtagcattgtatgactccagccccatcaagccggtcgcaactatgc

SEQ ID NO: 5683 - DNA, 80 bp, Artificial Sequence
  Description of Artificial Sequence: Synthetic oligonucleotide
tgtatgggccgcgctaagtcagccggttcgtcaagtagcacaggggagacacgtggttaacaagccggtcgcaactatgc

SEQ ID NO: 5684 - DNA, 80 bp, Artificial Sequence
  Description of Artificial Sequence: Synthetic oligonucleotide
tgtatgggccgcgctaagtcagccggttcgtcaagtagcaagactcataccatctgggcacaagccggtcgcaactatgc

SEQ ID NO: 5685 - DNA, 80 bp, Artificial Sequence
  Description of Artificial Sequence: Synthetic oligonucleotide
tgtatgggccgcgctaagtcagccggttcgtcaagtagcaggtattgaggtggcagttcccaagccggtcgcaactatgc

SEQ ID NO: 5686 - DNA, 80 bp, Artificial Sequence
  Description of Artificial Sequence: Synthetic oligonucleotide
tgtatgggccgcgctaagtcagccggttcgtcaagtagcacttcgctggcacatgcatgtcaagccggtcgcaactatgc

SEQ ID NO: 5687 - DNA, 80 bp, Artificial Sequence
  Description of Artificial Sequence: Synthetic oligonucleotide
tgtatgggccgcgctaagtcagccggttcgtcaagtagcagccaatgtgcacttgcctgccaagccggtcgcaactatgc

SEQ ID NO: 5688 - DNA, 80 bp, Artificial Sequence
  Description of Artificial Sequence: Synthetic oligonucleotide
tgtatgggccgcgctaagtcagccggttcgtcaagtagcaaccactggctctaggaagttcaagccggtcgcaactatgc

SEQ ID NO: 5689 - DNA, 80 bp, Artificial Sequence
  Description of Artificial Sequence: Synthetic oligonucleotide
tgtatgggccgcgctaagtcagccggttcgtcaagtagcacaggcacctaggcatgaagacaagccggtcgcaactatgc

SEQ ID NO: 5690 - DNA, 80 bp, Artificial Sequence
  Description of Artificial Sequence: Synthetic oligonucleotide
tgtatgggccgcgctaagtcagccggttcgtcaagtagcatgaacacgtccctgccctgacaagccggtcgcaactatgc

SEQ ID NO: 5691 - DNA, 80 bp, Artificial Sequence
  Description of Artificial Sequence: Synthetic oligonucleotide
tgtatgggccgcgctaagtcagccggttcgtcaagtagcaaggattgtgagacctctgctcaagccggtcgcaactatgc

SEQ ID NO: 5692 - DNA, 80 bp, Artificial Sequence
  Description of Artificial Sequence: Synthetic oligonucleotide
tgtatgggccgcgctaagtcagccggttcgtcaagtagcatgctctgctttgggagtggacaagccggtcgcaactatgc

SEQ ID NO: 5693 - DNA, 80 bp, Artificial Sequence
  Description of Artificial Sequence: Synthetic oligonucleotide
tgtatgggccgcgctaagtcagccggttcgtcaagtagcaggaacagcccttcattctggcaagccggtcgcaactatgc

SEQ ID NO: 5694 - DNA, 80 bp, Artificial Sequence
  Description of Artificial Sequence: Synthetic oligonucleotide
tgtatgggccgcgctaagtcagccggttcgtcaagtagcaccacttcctcctactacccgcaagccggtcgcaactatgc

SEQ ID NO: 5695 - DNA, 80 bp, Artificial Sequence
  Description of Artificial Sequence: Synthetic oligonucleotide
tgtatgggccgcgctaagtcagccggttcgtcaagtagcagaagcgcgtcccaaacatcgcaagccggtcgcaactatgc

SEQ ID NO: 5696 - DNA, 80 bp, Artificial Sequence
  Description of Artificial Sequence: Synthetic oligonucleotide
tgtatgggccgcgctaagtcagccggttcgtcaagtagcaaatatttggggtggcttgggcaagccggtcgcaactatgc

SEQ ID NO: 5697 - DNA, 80 bp, Artificial Sequence
  Description of Artificial Sequence: Synthetic oligonucleotide
tgtatgggccgcgctaagtcagccggttcgtcaagtagcaatttctggcataggggcactcaagccggtcgcaactatgc

SEQ ID NO: 5698 - DNA, 80 bp, Artificial Sequence
  Description of Artificial Sequence: Synthetic oligonucleotide
tgtatgggccgcgctaagtcagccggttcgtcaagtagcaaggaacccagcccctcatcccaagccggtcgcaactatgc

SEQ ID NO: 5699 - DNA, 80 bp, Artificial Sequence
  Description of Artificial Sequence: Synthetic oligonucleotide
tgtatgggccgcgctaagtcagccggttcgtcaagtagcaagccatcagcatagtcacctcaagccggtcgcaactatgc

SEQ ID NO: 5700 - DNA, 80 bp, Artificial Sequence
  Description of Artificial Sequence: Synthetic oligonucleotide
tgtatgggccgcgctaagtcagccggttcgtcaagtagcatcccaaagtcagaccttgctcaagccggtcgcaactatgc

SEQ ID NO: 5701 - DNA, 80 bp, Artificial Sequence
  Description of Artificial Sequence: Synthetic oligonucleotide
tgtatgggccgcgctaagtcagccggttcgtcaagtagcaaggggaaccttgcctgtttacaagccggtcgcaactatgc

SEQ ID NO: 5702 - DNA, 80 bp, Artificial Sequence
  Description of Artificial Sequence: Synthetic oligonucleotide
tgtatgggccgcgctaagtcagccggttcgtcaagtagcaaccccaggaatcatggtcttcaagccggtcgcaactatgc

SEQ ID NO: 5703 - DNA, 80 bp, Artificial Sequence
  Description of Artificial Sequence: Synthetic oligonucleotide
tgtatgggccgcgctaagtcagccggttcgtcaagtagcaccgctaccatttgtcccctccaagccggtcgcaactatgc

SEQ ID NO: 5704 - DNA, 80 bp, Artificial Sequence
  Description of Artificial Sequence: Synthetic oligonucleotide
tgtatgggccgcgctaagtcagccggttcgtcaagtagcacctcaagggacaactgcatccaagccggtcgcaactatgc

SEQ ID NO: 5705 - DNA, 80 bp, Artificial Sequence
  Description of Artificial Sequence: Synthetic oligonucleotide
tgtatgggccgcgctaagtcagccggttcgtcaagtagcattggacggaaatagctgggacaagccggtcgcaactatgc

SEQ ID NO: 5706 - DNA, 80 bp, Artificial Sequence
  Description of Artificial Sequence: Synthetic oligonucleotide
tgtatgggccgcgctaagtcagccggttcgtcaagtagcatgactgcatgagatgagccacaagccggtcgcaactatgc

SEQ ID NO: 5707 - DNA, 80 bp, Artificial Sequence
  Description of Artificial Sequence: Synthetic oligonucleotide
tgtatgggccgcgctaagtcagccggttcgtcaagtagcaggggctcagtcatacgtgtccaagccggtcgcaactatgc

SEQ ID NO: 5708 - DNA, 80 bp, Artificial Sequence
  Description of Artificial Sequence: Synthetic oligonucleotide
tgtatgggccgcgctaagtcagccggttcgtcaagtagcataggctgtggcatatacgcgcaagccggtcgcaactatgc

SEQ ID NO: 5709 - DNA, 80 bp, Artificial Sequence
  Description of Artificial Sequence: Synthetic oligonucleotide
tgtatgggccgcgctaagtcagccggttcgtcaagtagcatggggagcaaatgatttcgccaagccggtcgcaactatgc

SEQ ID NO: 5710 - DNA, 80 bp, Artificial Sequence
  Description of Artificial Sequence: Synthetic oligonucleotide
tgtatgggccgcgctaagtcagccggttcgtcaagtagcaaggaatcagttagccccacccaagccggtcgcaactatgc

SEQ ID NO: 5711 - DNA, 80 bp, Artificial Sequence
  Description of Artificial Sequence: Synthetic oligonucleotide
tgtatgggccgcgctaagtcagccggttcgtcaagtagcaggcaaccctagccctagagacaagccggtcgcaactatgc

SEQ ID NO: 5712 - DNA, 80 bp, Artificial Sequence
  Description of Artificial Sequence: Synthetic oligonucleotide
tgtatgggccgcgctaagtcagccggttcgtcaagtagcacagggcattgggtcacaaagcaagccggtcgcaactatgc

SEQ ID NO: 5713 - DNA, 80 bp, Artificial Sequence
  Description of Artificial Sequence: Synthetic oligonucleotide
tgtatgggccgcgctaagtcagccggttcgtcaagtagcaagaattcagtggtgcctcctcaagccggtcgcaactatgc

SEQ ID NO: 5714 - DNA, 80 bp, Artificial Sequence
  Description of Artificial Sequence: Synthetic oligonucleotide
tgtatgggccgcgctaagtcagccggttcgtcaagtagcaaagtcgagaggctacgaacgcaagccggtcgcaactatgc

SEQ ID NO: 5715 - DNA, 80 bp, Artificial Sequence
  Description of Artificial Sequence: Synthetic oligonucleotide
tgtatgggccgcgctaagtcagccggttcgtcaagtagcaccgacagggagcagaacttacaagccggtcgcaactatgc

SEQ ID NO: 5716 - DNA, 80 bp, Artificial Sequence
  Description of Artificial Sequence: Synthetic oligonucleotide
tgtatgggccgcgctaagtcagccggttcgtcaagtagcagttgtggagtggaggacccgcaagccggtcgcaactatgc

SEQ ID NO: 5717 - DNA, 80 bp, Artificial Sequence
  Description of Artificial Sequence: Synthetic oligonucleotide
tgtatgggccgcgctaagtcagccggttcgtcaagtagcaccacaatagcaggggagtggcaagccggtcgcaactatgc

SEQ ID NO: 5718 - DNA, 80 bp, Artificial Sequence
  Description of Artificial Sequence: Synthetic oligonucleotide
tgtatgggccgcgctaagtcagccggttcgtcaagtagcaaaggcaagtgggaatggacacaagccggtcgcaactatgc

SEQ ID NO: 5719 - DNA, 80 bp, Artificial Sequence
  Description of Artificial Sequence: Synthetic oligonucleotide
tgtatgggccgcgctaagtcagccggttcgtcaagtagcagcaaattgctggtctcaggacaagccggtcgcaactatgc

SEQ ID NO: 5720 - DNA, 80 bp, Artificial Sequence
  Description of Artificial Sequence: Synthetic oligonucleotide
tgtatgggccgcgctaagtcagccggttcgtcaagtagcagtactcgccccaccctaccccaagccggtcgcaactatgc

SEQ ID NO: 5721 - DNA, 80 bp, Artificial Sequence
  Description of Artificial Sequence: Synthetic oligonucleotide
tgtatgggccgcgctaagtcagccggttcgtcaagtagcatttggtgcttcactgctctgcaagccggtcgcaactatgc

SEQ ID NO: 5722 - DNA, 80 bp, Artificial Sequence
  Description of Artificial Sequence: Synthetic oligonucleotide
tgtatgggccgcgctaagtcagccggttcgtcaagtagcactgactagggttggagcagacaagccggtcgcaactatgc

SEQ ID NO: 5723 - DNA, 80 bp, Artificial Sequence
  Description of Artificial Sequence: Synthetic oligonucleotide
tgtatgggccgcgctaagtcagccggttcgtcaagtagcatgtcaatcctcaccttgggtcaagccggtcgcaactatgc

SEQ ID NO: 5724 - DNA, 80 bp, Artificial Sequence
  Description of Artificial Sequence: Synthetic oligonucleotide
tgtatgggccgcgctaagtcagccggttcgtcaagtagcaggctgcccctttgtacccagcaagccggtcgcaactatgc

SEQ ID NO: 5725 - DNA, 80 bp, Artificial Sequence
  Description of Artificial Sequence: Synthetic oligonucleotide
tgtatgggccgcgctaagtcagccggttcgtcaagtagcacccaaccagtgttctgtcagcaagccggtcgcaactatgc

SEQ ID NO: 5726 - DNA, 80 bp, Artificial Sequence
  Description of Artificial Sequence: Synthetic oligonucleotide
tgtatgggccgcgctaagtcagccggttcgtcaagtagcactttcaagcctggttctccccaagccggtcgcaactatgc

SEQ ID NO: 5727 - DNA, 80 bp, Artificial Sequence
  Description of Artificial Sequence: Synthetic oligonucleotide
tgtatgggccgcgctaagtcagccggttcgtcaagtagcaaaatggcccagggacttgtacaagccggtcgcaactatgc

SEQ ID NO: 5728 - DNA, 80 bp, Artificial Sequence
  Description of Artificial Sequence: Synthetic oligonucleotide
tgtatgggccgcgctaagtcagccggttcgtcaagtagcagactcactcaggttttggcgcaagccggtcgcaactatgc

SEQ ID NO: 5729 - DNA, 80 bp, Artificial Sequence
  Description of Artificial Sequence: Synthetic oligonucleotide
tgtatgggccgcgctaagtcagccggttcgtcaagtagcatctgcagctagtgtgatccacaagccggtcgcaactatgc

SEQ ID NO: 5730 - DNA, 80 bp, Artificial Sequence
  Description of Artificial Sequence: Synthetic oligonucleotide
tgtatgggccgcgctaagtcagccggttcgtcaagtagcataaccacatcacacccctgccaagccggtcgcaactatgc

SEQ ID NO: 5731 - DNA, 80 bp, Artificial Sequence
  Description of Artificial Sequence: Synthetic oligonucleotide
tgtatgggccgcgctaagtcagccggttcgtcaagtagcaatgaagacagcatccccacacaagccggtcgcaactatgc

SEQ ID NO: 5732 - DNA, 80 bp, Artificial Sequence
  Description of Artificial Sequence: Synthetic oligonucleotide
tgtatgggccgcgctaagtcagccggttcgtcaagtagcatgcagcaggcttcagcacaccaagccggtcgcaactatgc

SEQ ID NO: 5733 - DNA, 80 bp, Artificial Sequence
  Description of Artificial Sequence: Synthetic oligonucleotide
tgtatgggccgcgctaagtcagccggttcgtcaagtagcaaagggaaggtgactcaaggacaagccggtcgcaactatgc

SEQ ID NO: 5734 - DNA, 80 bp, Artificial Sequence
  Description of Artificial Sequence: Synthetic oligonucleotide
tgtatgggccgcgctaagtcagccggttcgtcaagtagcacagggtggggaccagagcagcaagccggtcgcaactatgc

SEQ ID NO: 5735 - DNA, 80 bp, Artificial Sequence
  Description of Artificial Sequence: Synthetic oligonucleotide
tgtatgggccgcgctaagtcagccggttcgtcaagtagcaaactatcaccacgcttcccacaagccggtcgcaactatgc

SEQ ID NO: 5736 - DNA, 80 bp, Artificial Sequence
  Description of Artificial Sequence: Synthetic oligonucleotide
tgtatgggccgcgctaagtcagccggttcgtcaagtagcattgttttggctccaatggcacaagccggtcgcaactatgc

SEQ ID NO: 5737 - DNA, 80 bp, Artificial Sequence
  Description of Artificial Sequence: Synthetic oligonucleotide
tgtatgggccgcgctaagtcagccggttcgtcaagtagcaatagccagagtcccagtctgcaagccggtcgcaactatgc

SEQ ID NO: 5738 - DNA, 80 bp, Artificial Sequence
  Description of Artificial Sequence: Synthetic oligonucleotide
tgtatgggccgcgctaagtcagccggttcgtcaagtagcagtgaagggtaggagtgaggccaagccggtcgcaactatgc

SEQ ID NO: 5739 - DNA, 80 bp, Artificial Sequence
  Description of Artificial Sequence: Synthetic oligonucleotide
tgtatgggccgcgctaagtcagccggttcgtcaagtagcatctgcctgctccaagaacaacaagccggtcgcaactatgc

SEQ ID NO: 5740 - DNA, 80 bp, Artificial Sequence
  Description of Artificial Sequence: Synthetic oligonucleotide
tgtatgggccgcgctaagtcagccggttcgtcaagtagcatagcactgagggccaggaaccaagccggtcgcaactatgc

SEQ ID NO: 5741 - DNA, 80 bp, Artificial Sequence
  Description of Artificial Sequence: Synthetic oligonucleotide
tgtatgggccgcgctaagtcagccggttcgtcaagtagcagtgggcacagtgacaatcaccaagccggtcgcaactatgc

SEQ ID NO: 5742 - DNA, 80 bp, Artificial Sequence
  Description of Artificial Sequence: Synthetic oligonucleotide
tgtatgggccgcgctaagtcagccggttcgtcaagtagcaccaagtggaaaagttgcggtcaagccggtcgcaactatgc

SEQ ID NO: 5743 - DNA, 80 bp, Artificial Sequence
  Description of Artificial Sequence: Synthetic oligonucleotide
tgtatgggccgcgctaagtcagccggttcgtcaagtagcatacaaaaggcagagaggggtcaagccggtcgcaactatgc

SEQ ID NO: 5744 - DNA, 80 bp, Artificial Sequence
  Description of Artificial Sequence: Synthetic oligonucleotide
tgtatgggccgcgctaagtcagccggttcgtcaagtagcaggagtaggaatctccagcgacaagccggtcgcaactatgc

SEQ ID NO: 5745 - DNA, 80 bp, Artificial Sequence
  Description of Artificial Sequence: Synthetic oligonucleotide
tgtatgggccgcgctaagtcagccggttcgtcaagtagcactagggcagaagtgcattgccaagccggtcgcaactatgc

SEQ ID NO: 5746 - DNA, 80 bp, Artificial Sequence
  Description of Artificial Sequence: Synthetic oligonucleotide
tgtatgggccgcgctaagtcagccggttcgtcaagtagcatgttaaaccctcacccctctcaagccggtcgcaactatgc

SEQ ID NO: 5747 - DNA, 80 bp, Artificial Sequence
  Description of Artificial Sequence: Synthetic oligonucleotide
tgtatgggccgcgctaagtcagccggttcgtcaagtagcaggcagatacccaacaagcagcaagccggtcgcaactatgc

SEQ ID NO: 5748 - DNA, 80 bp, Artificial Sequence
  Description of Artificial Sequence: Synthetic oligonucleotide
tgtatgggccgcgctaagtcagccggttcgtcaagtagcacttggcgccctcctgaagtacaagccggtcgcaactatgc

SEQ ID NO: 5749 - DNA, 80 bp, Artificial Sequence
  Description of Artificial Sequence: Synthetic oligonucleotide
tgtatgggccgcgctaagtcagccggttcgtcaagtagcagcagttgaaatcccagccatcaagccggtcgcaactatgc

SEQ ID NO: 5750 - DNA, 80 bp, Artificial Sequence
  Description of Artificial Sequence: Synthetic oligonucleotide
tgtatgggccgcgctaagtcagccggttcgtcaagtagcaagggatctgggacacttggacaagccggtcgcaactatgc

SEQ ID NO: 5751 - DNA, 80 bp, Artificial Sequence
  Description of Artificial Sequence: Synthetic oligonucleotide
tgtatgggccgcgctaagtcagccggttcgtcaagtagcaccatggacgtgttcatctggcaagccggtcgcaactatgc

SEQ ID NO: 5752 - DNA, 80 bp, Artificial Sequence
  Description of Artificial Sequence: Synthetic oligonucleotide
tgtatgggccgcgctaagtcagccggttcgtcaagtagcacacaaagtcaaggtgccacacaagccggtcgcaactatgc

SEQ ID NO: 5753 - DNA, 80 bp, Artificial Sequence
  Description of Artificial Sequence: Synthetic oligonucleotide
tgtatgggccgcgctaagtcagccggttcgtcaagtagcattgatctggcctggggtattcaagccggtcgcaactatgc

SEQ ID NO: 5754 - DNA, 80 bp, Artificial Sequence
  Description of Artificial Sequence: Synthetic oligonucleotide
tgtatgggccgcgctaagtcagccggttcgtcaagtagcactctggcagtgtgttggcagcaagccggtcgcaactatgc

SEQ ID NO: 5755 - DNA, 80 bp, Artificial Sequence
  Description of Artificial Sequence: Synthetic oligonucleotide
tgtatgggccgcgctaagtcagccggttcgtcaagtagcaccttgcaagcctgaagtggtcaagccggtcgcaactatgc

SEQ ID NO: 5756 - DNA, 80 bp, Artificial Sequence
  Description of Artificial Sequence: Synthetic oligonucleotide
tgtatgggccgcgctaagtctgtatgccgagcggttcagttccgtggtgtattcatgggtcaagccggtcgcaactatgc

SEQ ID NO: 5757 - DNA, 80 bp, Artificial Sequence
  Description of Artificial Sequence: Synthetic oligonucleotide
tgtatgggccgcgctaagtctgtatgccgagcggttcagtagcacagcagcttgggatctcaagccggtcgcaactatgc

SEQ ID NO: 5758 - DNA, 80 bp, Artificial Sequence
  Description of Artificial Sequence: Synthetic oligonucleotide
tgtatgggccgcgctaagtctgtatgccgagcggttcagttcccctcctttcaccaacgccaagccggtcgcaactatgc

SEQ ID NO: 5759 - DNA, 80 bp, Artificial Sequence
  Description of Artificial Sequence: Synthetic oligonucleotide
tgtatgggccgcgctaagtctgtatgccgagcggttcagtcgcactctgctcgagacaatcaagccggtcgcaactatgc

SEQ ID NO: 5760 - DNA, 80 bp, Artificial Sequence
  Description of Artificial Sequence: Synthetic oligonucleotide
tgtatgggccgcgctaagtctgtatgccgagcggttcagtatgaaaagtcggtcgcagggcaagccggtcgcaactatgc

SEQ ID NO: 5761 - DNA, 80 bp, Artificial Sequence
  Description of Artificial Sequence: Synthetic oligonucleotide
tgtatgggccgcgctaagtctgtatgccgagcggttcagtcccaaggcacaggaatccttcaagccggtcgcaactatgc

SEQ ID NO: 5762 - DNA, 80 bp, Artificial Sequence
  Description of Artificial Sequence: Synthetic oligonucleotide
tgtatgggccgcgctaagtctgtatgccgagcggttcagttggtgttgttacaatgcccccaagccggtcgcaactatgc

SEQ ID NO: 5763 - DNA, 80 bp, Artificial Sequence
  Description of Artificial Sequence: Synthetic oligonucleotide
tgtatgggccgcgctaagtctgtatgccgagcggttcagtgggccaggagtatcttgtgacaagccggtcgcaactatgc

SEQ ID NO: 5764 - DNA, 80 bp, Artificial Sequence
  Description of Artificial Sequence: Synthetic oligonucleotide
tgtatgggccgcgctaagtctgtatgccgagcggttcagtctatgccacctttgtgcctgcaagccggtcgcaactatgc

SEQ ID NO: 5765 - DNA, 80 bp, Artificial Sequence
  Description of Artificial Sequence: Synthetic oligonucleotide
tgtatgggccgcgctaagtctgtatgccgagcggttcagtttgctggacctcatgctaggcaagccggtcgcaactatgc

SEQ ID NO: 5766 - DNA, 80 bp, Artificial Sequence
  Description of Artificial Sequence: Synthetic oligonucleotide
tgtatgggccgcgctaagtctgtatgccgagcggttcagtctgcatgtagccaccaacttcaagccggtcgcaactatgc

SEQ ID NO: 5767 - DNA, 80 bp, Artificial Sequence
  Description of Artificial Sequence: Synthetic oligonucleotide
tgtatgggccgcgctaagtctgtatgccgagcggttcagtcagggccagtgactagggatcaagccggtcgcaactatgc

SEQ ID NO: 5768 - DNA, 80 bp, Artificial Sequence
  Description of Artificial Sequence: Synthetic oligonucleotide
tgtatgggccgcgctaagtctgtatgccgagcggttcagtaacatggaacaggctctcctcaagccggtcgcaactatgc

SEQ ID NO: 5769 - DNA, 80 bp, Artificial Sequence
  Description of Artificial Sequence: Synthetic oligonucleotide
tgtatgggccgcgctaagtctgtatgccgagcggttcagtaccccgcaaaagtgaaagagcaagccggtcgcaactatgc

SEQ ID NO: 5770 - DNA, 80 bp, Artificial Sequence
  Description of Artificial Sequence: Synthetic oligonucleotide
tgtatgggccgcgctaagtctgtatgccgagcggttcagttccagccacaatggacttctcaagccggtcgcaactatgc

SEQ ID NO: 5771 - DNA, 80 bp, Artificial Sequence
  Description of Artificial Sequence: Synthetic oligonucleotide
tgtatgggccgcgctaagtctgtatgccgagcggttcagtcagggctgaggcatgacaggcaagccggtcgcaactatgc

SEQ ID NO: 5772 - DNA, 80 bp, Artificial Sequence
  Description of Artificial Sequence: Synthetic oligonucleotide
tgtatgggccgcgctaagtctgtatgccgagcggttcagtacggctctcagctacattgccaagccggtcgcaactatgc

SEQ ID NO: 5773 - DNA, 80 bp, Artificial Sequence
  Description of Artificial Sequence: Synthetic oligonucleotide
tgtatgggccgcgctaagtctgtatgccgagcggttcagtcaacagccctgatgcacaagcaagccggtcgcaactatgc

SEQ ID NO: 5774 - DNA, 80 bp, Artificial Sequence
  Description of Artificial Sequence: Synthetic oligonucleotide
tgtatgggccgcgctaagtctgtatgccgagcggttcagtcccactcggtccatagtgatcaagccggtcgcaactatgc

SEQ ID NO: 5775 - DNA, 80 bp, Artificial Sequence
  Description of Artificial Sequence: Synthetic oligonucleotide
tgtatgggccgcgctaagtctgtatgccgagcggttcagtattagaacctggccagccatcaagccggtcgcaactatgc

SEQ ID NO: 5776 - DNA, 80 bp, Artificial Sequence
  Description of Artificial Sequence: Synthetic oligonucleotide
tgtatgggccgcgctaagtctgtatgccgagcggttcagtaacccttgtccaaacatgcacaagccggtcgcaactatgc

SEQ ID NO: 5777 - DNA, 80 bp, Artificial Sequence
  Description of Artificial Sequence: Synthetic oligonucleotide
tgtatgggccgcgctaagtctgtatgccgagcggttcagttgaccagctgctcaggaagtcaagccggtcgcaactatgc

SEQ ID NO: 5778 - DNA, 80 bp, Artificial Sequence
  Description of Artificial Sequence: Synthetic oligonucleotide
tgtatgggccgcgctaagtctgtatgccgagcggttcagtatttgaggcaatggctgaggcaagccggtcgcaactatgc

SEQ ID NO: 5779 - DNA, 80 bp, Artificial Sequence
  Description of Artificial Sequence: Synthetic oligonucleotide
tgtatgggccgcgctaagtctgtatgccgagcggttcagtataccttactgcctcgtggtcaagccggtcgcaactatgc

SEQ ID NO: 5780 - DNA, 80 bp, Artificial Sequence
  Description of Artificial Sequence: Synthetic oligonucleotide
tgtatgggccgcgctaagtctgtatgccgagcggttcagtcccacagctagctcaacagccaagccggtcgcaactatgc

SEQ ID NO: 5781 - DNA, 80 bp, Artificial Sequence
  Description of Artificial Sequence: Synthetic oligonucleotide
tgtatgggccgcgctaagtctgtatgccgagcggttcagtagtcttgccactgctaaggacaagccggtcgcaactatgc

SEQ ID NO: 5782 - DNA, 80 bp, Artificial Sequence
  Description of Artificial Sequence: Synthetic oligonucleotide
tgtatgggccgcgctaagtctgtatgccgagcggttcagtctgccctggaaatgtgtggacaagccggtcgcaactatgc

SEQ ID NO: 5783 - DNA, 80 bp, Artificial Sequence
  Description of Artificial Sequence: Synthetic oligonucleotide
tgtatgggccgcgctaagtcagccggttcgtcaagtagcaccagtacccatcagtgccctcaagccggtcgcaactatgc

SEQ ID NO: 5784 - DNA, 80 bp, Artificial Sequence
  Description of Artificial Sequence: Synthetic oligonucleotide
tgtatgggccgcgctaagtcagccggttcgtcaagtagcactggagcaggactttgcatccaagccggtcgcaactatgc

SEQ ID NO: 5785 - DNA, 80 bp, Artificial Sequence
  Description of Artificial Sequence: Synthetic oligonucleotide
tgtatgggccgcgctaagtcagccggttcgtcaagtagcaaggtgggattgtagctggatcaagccggtcgcaactatgc

SEQ ID NO: 5786 - DNA, 80 bp, Artificial Sequence
  Description of Artificial Sequence: Synthetic oligonucleotide
tgtatgggccgcgctaagtcagccggttcgtcaagtagcaagcttagggatggctctgtccaagccggtcgcaactatgc

SEQ ID NO: 5787 - DNA, 80 bp, Artificial Sequence
  Description of Artificial Sequence: Synthetic oligonucleotide
tgtatgggccgcgctaagtcagccggttcgtcaagtagcaggtcagtttcatggtgtccccaagccggtcgcaactatgc

SEQ ID NO: 5788 - DNA, 80 bp, Artificial Sequence
  Description of Artificial Sequence: Synthetic oligonucleotide
tgtatgggccgcgctaagtcagccggttcgtcaagtagcacccgctgcctccttgtgtaccaagccggtcgcaactatgc

SEQ ID NO: 5789 - DNA, 80 bp, Artificial Sequence
  Description of Artificial Sequence: Synthetic oligonucleotide
tgtatgggccgcgctaagtcagccggttcgtcaagtagcagcaatgtggggccccatccccaagccggtcgcaactatgc

SEQ ID NO: 5790 - DNA, 80 bp, Artificial Sequence
  Description of Artificial Sequence: Synthetic oligonucleotide
tgtatgggccgcgctaagtcagccggttcgtcaagtagcataggcatgtgacttcctggtcaagccggtcgcaactatgc

SEQ ID NO: 5791 - DNA, 80 bp, Artificial Sequence
  Description of Artificial Sequence: Synthetic oligonucleotide
tgtatgggccgcgctaagtcagccggttcgtcaagtagcaaggcggacctgatgttctcacaagccggtcgcaactatgc

SEQ ID NO: 5792 - DNA, 80 bp, Artificial Sequence
  Description of Artificial Sequence: Synthetic oligonucleotide
tgtatgggccgcgctaagtcagccggttcgtcaagtagcatggggaaaccaataccgagccaagccggtcgcaactatgc

SEQ ID NO: 5793 - DNA, 80 bp, Artificial Sequence
  Description of Artificial Sequence: Synthetic oligonucleotide
tgtatgggccgcgctaagtcagccggttcgtcaagtagcaaagtggaaactagggctggacaagccggtcgcaactatgc

SEQ ID NO: 5794 - DNA, 80 bp, Artificial Sequence
  Description of Artificial Sequence: Synthetic oligonucleotide
tgtatgggccgcgctaagtcagccggttcgtcaagtagcaggtccgcctcctgctcagaccaagccggtcgcaactatgc

SEQ ID NO: 5795 - DNA, 80 bp, Artificial Sequence
  Description of Artificial Sequence: Synthetic oligonucleotide
tgtatgggccgcgctaagtcagccggttcgtcaagtagcaaataaaccggagatgcctgccaagccggtcgcaactatgc

SEQ ID NO: 5796 - DNA, 80 bp, Artificial Sequence
  Description of Artificial Sequence: Synthetic oligonucleotide
tgtatgggccgcgctaagtcagccggttcgtcaagtagcactctgaaaaccctggtgccacaagccggtcgcaactatgc

SEQ ID NO: 5797 - DNA, 80 bp, Artificial Sequence
  Description of Artificial Sequence: Synthetic oligonucleotide
tgtatgggccgcgctaagtcagccggttcgtcaagtagcattcgtccttcatccactcgacaagccggtcgcaactatgc

SEQ ID NO: 5798 - DNA, 80 bp, Artificial Sequence
  Description of Artificial Sequence: Synthetic oligonucleotide
tgtatgggccgcgctaagtcagccggttcgtcaagtagcatacaattgcatgatggggcgcaagccggtcgcaactatgc

SEQ ID NO: 5799 - DNA, 80 bp, Artificial Sequence
  Description of Artificial Sequence: Synthetic oligonucleotide
tgtatgggccgcgctaagtcagccggttcgtcaagtagcagactgagaaccgtaggctggcaagccggtcgcaactatgc

SEQ ID NO: 5800 - DNA, 80 bp, Artificial Sequence
  Description of Artificial Sequence: Synthetic oligonucleotide
tgtatgggccgcgctaagtcagccggttcgtcaagtagcaaatctcttgcatgtcagccccaagccggtcgcaactatgc

SEQ ID NO: 5801 - DNA, 80 bp, Artificial Sequence
  Description of Artificial Sequence: Synthetic oligonucleotide
tgtatgggccgcgctaagtcagccggttcgtcaagtagcatagtctttaggcagcaggcacaagccggtcgcaactatgc

SEQ ID NO: 5802 - DNA, 80 bp, Artificial Sequence
  Description of Artificial Sequence: Synthetic oligonucleotide
tgtatgggccgcgctaagtcagccggttcgtcaagtagcaggggctttgagttttctgcacaagccggtcgcaactatgc

SEQ ID NO: 5803 - DNA, 80 bp, Artificial Sequence
  Description of Artificial Sequence: Synthetic oligonucleotide
tgtatgggccgcgctaagtcagccggttcgtcaagtagcaaagaactggttcacctgggccaagccggtcgcaactatgc

SEQ ID NO: 5804 - DNA, 80 bp, Artificial Sequence
  Description of Artificial Sequence: Synthetic oligonucleotide
tgtatgggccgcgctaagtcagccggttcgtcaagtagcatgtagcacccatgagactcccaagccggtcgcaactatgc

SEQ ID NO: 5805 - DNA, 80 bp, Artificial Sequence
  Description of Artificial Sequence: Synthetic oligonucleotide
tgtatgggccgcgctaagtcagccggttcgtcaagtagcagacagcccaatagcaaaggccaagccggtcgcaactatgc

SEQ ID NO: 5806 - DNA, 80 bp, Artificial Sequence
  Description of Artificial Sequence: Synthetic oligonucleotide
tgtatgggccgcgctaagtcagccggttcgtcaagtagcaagtgtgtgactgattgtgcccaagccggtcgcaactatgc

SEQ ID NO: 5807 - DNA, 80 bp, Artificial Sequence
  Description of Artificial Sequence: Synthetic oligonucleotide
tgtatgggccgcgctaagtcagccggttcgtcaagtagcactggtccctgcaagtgtttgcaagccggtcgcaactatgc

SEQ ID NO: 5808 - DNA, 80 bp, Artificial Sequence
  Description of Artificial Sequence: Synthetic oligonucleotide
tgtatgggccgcgctaagtcagccggttcgtcaagtagcacgttccctgagccatcccagcaagccggtcgcaactatgc

SEQ ID NO: 5809 - DNA, 80 bp, Artificial Sequence
  Description of Artificial Sequence: Synthetic oligonucleotide
tgtatgggccgcgctaagtcagccggttcgtcaagtagcaatggcattcctggaactggacaagccggtcgcaactatgc

SEQ ID NO: 5810 - DNA, 80 bp, Artificial Sequence
  Description of Artificial Sequence: Synthetic oligonucleotide
tgtatgggccgcgctaagtcagccggttcgtcaagtagcatgacaccttccccaaaacgtcaagccggtcgcaactatgc

SEQ ID NO: 5811 - DNA, 80 bp, Artificial Sequence
  Description of Artificial Sequence: Synthetic oligonucleotide
tgtatgggccgcgctaagtcagccggttcgtcaagtagcaggccaagcagatactgaagccaagccggtcgcaactatgc

SEQ ID NO: 5812 - DNA, 80 bp, Artificial Sequence
  Description of Artificial Sequence: Synthetic oligonucleotide
tgtatgggccgcgctaagtcagccggttcgtcaagtagcacagcaggtctgagggtgtttcaagccggtcgcaactatgc

SEQ ID NO: 5813 - DNA, 80 bp, Artificial Sequence
  Description of Artificial Sequence: Synthetic oligonucleotide
tgtatgggccgcgctaagtcagccggttcgtcaagtagcattccggtggtagtgatgtctcaagccggtcgcaactatgc

SEQ ID NO: 5814 - DNA, 80 bp, Artificial Sequence
  Description of Artificial Sequence: Synthetic oligonucleotide
tgtatgggccgcgctaagtcagccggttcgtcaagtagcatgctctcggccagaactcagcaagccggtcgcaactatgc

SEQ ID NO: 5815 - DNA, 80 bp, Artificial Sequence
  Description of Artificial Sequence: Synthetic oligonucleotide
tgtatgggccgcgctaagtcagccggttcgtcaagtagcattgtttgaaaacccagggcacaagccggtcgcaactatgc

SEQ ID NO: 5816 - DNA, 80 bp, Artificial Sequence
  Description of Artificial Sequence: Synthetic oligonucleotide
tgtatgggccgcgctaagtcagccggttcgtcaagtagcaaggcaaatgtccatgcaagacaagccggtcgcaactatgc

SEQ ID NO: 5817 - DNA, 80 bp, Artificial Sequence
  Description of Artificial Sequence: Synthetic oligonucleotide
tgtatgggccgcgctaagtcagccggttcgtcaagtagcacccttttggttgggctagcacaagccggtcgcaactatgc

SEQ ID NO: 5818 - DNA, 80 bp, Artificial Sequence
  Description of Artificial Sequence: Synthetic oligonucleotide
tgtatgggccgcgctaagtcagccggttcgtcaagtagcatctgttgcccaaatgaagcacaagccggtcgcaactatgc

SEQ ID NO: 5819 - DNA, 80 bp, Artificial Sequence
  Description of Artificial Sequence: Synthetic oligonucleotide
tgtatgggccgcgctaagtcagccggttcgtcaagtagcagccactattaggctggagcacaagccggtcgcaactatgc

SEQ ID NO: 5820 - DNA, 80 bp, Artificial Sequence
  Description of Artificial Sequence: Synthetic oligonucleotide
tgtatgggccgcgctaagtcagccggttcgtcaagtagcatgaggaagggcgatatcagccaagccggtcgcaactatgc

SEQ ID NO: 5821 - DNA, 80 bp, Artificial Sequence
  Description of Artificial Sequence: Synthetic oligonucleotide
tgtatgggccgcgctaagtcagccggttcgtcaagtagcataggctagagtgagcaggtgcaagccggtcgcaactatgc

SEQ ID NO: 5822 - DNA, 80 bp, Artificial Sequence
  Description of Artificial Sequence: Synthetic oligonucleotide
tgtatgggccgcgctaagtcagccggttcgtcaagtagcatgccccaagaccagttggatcaagccggtcgcaactatgc

SEQ ID NO: 5823 - DNA, 80 bp, Artificial Sequence
  Description of Artificial Sequence: Synthetic oligonucleotide
tgtatgggccgcgctaagtcagccggttcgtcaagtagcaagggagtaggtctggctaggcaagccggtcgcaactatgc

SEQ ID NO: 5824 - DNA, 80 bp, Artificial Sequence
  Description of Artificial Sequence: Synthetic oligonucleotide
tgtatgggccgcgctaagtcagccggttcgtcaagtagcacagaaaaggcaggccacagccaagccggtcgcaactatgc

SEQ ID NO: 5825 - DNA, 80 bp, Artificial Sequence
  Description of Artificial Sequence: Synthetic oligonucleotide
tgtatgggccgcgctaagtcagccggttcgtcaagtagcaacgtctgctaccttctccaacaagccggtcgcaactatgc

SEQ ID NO: 5826 - DNA, 80 bp, Artificial Sequence
  Description of Artificial Sequence: Synthetic oligonucleotide
tgtatgggccgcgctaagtcagccggttcgtcaagtagcacccacccggatcaagctactcaagccggtcgcaactatgc

SEQ ID NO: 5827 - DNA, 80 bp, Artificial Sequence
  Description of Artificial Sequence: Synthetic oligonucleotide
tgtatgggccgcgctaagtcagccggttcgtcaagtagcaggctgctttgctccaaacgacaagccggtcgcaactatgc

SEQ ID NO: 5828 - DNA, 80 bp, Artificial Sequence
  Description of Artificial Sequence: Synthetic oligonucleotide
tgtatgggccgcgctaagtcagccggttcgtcaagtagcatgtgatccacagcttcctcacaagccggtcgcaactatgc

SEQ ID NO: 5829 - DNA, 80 bp, Artificial Sequence
  Description of Artificial Sequence: Synthetic oligonucleotide
tgtatgggccgcgctaagtcagccggttcgtcaagtagcatcttgctgtgagggatgactcaagccggtcgcaactatgc

SEQ ID NO: 5830 - DNA, 80 bp, Artificial Sequence
  Description of Artificial Sequence: Synthetic oligonucleotide
tgtatgggccgcgctaagtcagccggttcgtcaagtagcaagacatacagcctctggtgtcaagccggtcgcaactatgc

SEQ ID NO: 5831 - DNA, 80 bp, Artificial Sequence
  Description of Artificial Sequence: Synthetic oligonucleotide
tgtatgggccgcgctaagtcagccggttcgtcaagtagcagtggacctccaagggaatcccaagccggtcgcaactatgc

SEQ ID NO: 5832 - DNA, 80 bp, Artificial Sequence
  Description of Artificial Sequence: Synthetic oligonucleotide
tgtatgggccgcgctaagtcagccggttcgtcaagtagcaccatccttttgtcccttggccaagccggtcgcaactatgc

SEQ ID NO: 5833 - DNA, 80 bp, Artificial Sequence
  Description of Artificial Sequence: Synthetic oligonucleotide
tgtatgggccgcgctaagtctgtatgccgagcggttcagttagttctctccatgggcaggcaagccggtcgcaactatgc

SEQ ID NO: 5834 - DNA, 80 bp, Artificial Sequence
  Description of Artificial Sequence: Synthetic oligonucleotide
tgtatgggccgcgctaagtctgtatgccgagcggttcagtaagttctgtaaccccacccacaagccggtcgcaactatgc

SEQ ID NO: 5835 - DNA, 80 bp, Artificial Sequence
  Description of Artificial Sequence: Synthetic oligonucleotide
tgtatgggccgcgctaagtctgtatgccgagcggttcagttcgctcctagttttcacccacaagccggtcgcaactatgc

SEQ ID NO: 5836 - DNA, 80 bp, Artificial Sequence
  Description of Artificial Sequence: Synthetic oligonucleotide
tgtatgggccgcgctaagtctgtatgccgagcggttcagtattcctacgttgccaggtgtcaagccggtcgcaactatgc

SEQ ID NO: 5837 - DNA, 80 bp, Artificial Sequence
  Description of Artificial Sequence: Synthetic oligonucleotide
tgtatgggccgcgctaagtctgtatgccgagcggttcagttagggcttgcgttagaaggacaagccggtcgcaactatgc

SEQ ID NO: 5838 - DNA, 80 bp, Artificial Sequence
  Description of Artificial Sequence: Synthetic oligonucleotide
tgtatgggccgcgctaagtctgtatgccgagcggttcagtagcaactaccagtctcacctcaagccggtcgcaactatgc

SEQ ID NO: 5839 - DNA, 80 bp, Artificial Sequence
  Description of Artificial Sequence: Synthetic oligonucleotide
tgtatgggccgcgctaagtctgtatgccgagcggttcagttgtccagggacgacttttcccaagccggtcgcaactatgc

SEQ ID NO: 5840 - DNA, 80 bp, Artificial Sequence
  Description of Artificial Sequence: Synthetic oligonucleotide
tgtatgggccgcgctaagtctgtatgccgagcggttcagttgggtgtttgcaaagtctgtcaagccggtcgcaactatgc

SEQ ID NO: 5841 - DNA, 80 bp, Artificial Sequence
  Description of Artificial Sequence: Synthetic oligonucleotide
tgtatgggccgcgctaagtctgtatgccgagcggttcagtgagctcagccccagcgacaccaagccggtcgcaactatgc

SEQ ID NO: 5842 - DNA, 80 bp, Artificial Sequence
  Description of Artificial Sequence: Synthetic oligonucleotide
tgtatgggccgcgctaagtctgtatgccgagcggttcagtccggcaggagatactcgcgacaagccggtcgcaactatgc

SEQ ID NO: 5843 - DNA, 80 bp, Artificial Sequence
  Description of Artificial Sequence: Synthetic oligonucleotide
tgtatgggccgcgctaagtctgtatgccgagcggttcagtaacattcaaacagccaggctcaagccggtcgcaactatgc

SEQ ID NO: 5844 - DNA, 80 bp, Artificial Sequence
  Description of Artificial Sequence: Synthetic oligonucleotide
tgtatgggccgcgctaagtctgtatgccgagcggttcagttaggaccctggcatttaggtcaagccggtcgcaactatgc

SEQ ID NO: 5845 - DNA, 80 bp, Artificial Sequence
  Description of Artificial Sequence: Synthetic oligonucleotide
tgtatgggccgcgctaagtcagccggttcgtcaagtagcatgcaagccctaaaactagcccaagccggtcgcaactatgc

SEQ ID NO: 5846 - DNA, 80 bp, Artificial Sequence
  Description of Artificial Sequence: Synthetic oligonucleotide
tgtatgggccgcgctaagtcagccggttcgtcaagtagcattcaggggtcctatgtgcatcaagccggtcgcaactatgc

SEQ ID NO: 5847 - DNA, 80 bp, Artificial Sequence
  Description of Artificial Sequence: Synthetic oligonucleotide
tgtatgggccgcgctaagtcagccggttcgtcaagtagcaagctaaggcctgatgcttggcaagccggtcgcaactatgc

SEQ ID NO: 5848 - DNA, 80 bp, Artificial Sequence
  Description of Artificial Sequence: Synthetic oligonucleotide
tgtatgggccgcgctaagtcagccggttcgtcaagtagcattttgccccatggtttagctcaagccggtcgcaactatgc

SEQ ID NO: 5849 - DNA, 80 bp, Artificial Sequence
  Description of Artificial Sequence: Synthetic oligonucleotide
tgtatgggccgcgctaagtcagccggttcgtcaagtagcaaatggcctagtgatgtgggccaagccggtcgcaactatgc

SEQ ID NO: 5850 - DNA, 80 bp, Artificial Sequence
  Description of Artificial Sequence: Synthetic oligonucleotide
tgtatgggccgcgctaagtcagccggttcgtcaagtagcaagaactgtgacagcctagctcaagccggtcgcaactatgc

SEQ ID NO: 5851 - DNA, 80 bp, Artificial Sequence
  Description of Artificial Sequence: Synthetic oligonucleotide
tgtatgggccgcgctaagtcagccggttcgtcaagtagcattctctaaggggcccattcacaagccggtcgcaactatgc

SEQ ID NO: 5852 - DNA, 80 bp, Artificial Sequence
  Description of Artificial Sequence: Synthetic oligonucleotide
tgtatgggccgcgctaagtcagccggttcgtcaagtagcaagggattgagtcaagggacccaagccggtcgcaactatgc

SEQ ID NO: 5853 - DNA, 80 bp, Artificial Sequence
  Description of Artificial Sequence: Synthetic oligonucleotide
tgtatgggccgcgctaagtcagccggttcgtcaagtagcatccgtccgtacctatccctacaagccggtcgcaactatgc

SEQ ID NO: 5854 - DNA, 80 bp, Artificial Sequence
  Description of Artificial Sequence: Synthetic oligonucleotide
tgtatgggccgcgctaagtcagccggttcgtcaagtagcagtgagggtgtgattaaggcccaagccggtcgcaactatgc

SEQ ID NO: 5855 - DNA, 80 bp, Artificial Sequence
  Description of Artificial Sequence: Synthetic oligonucleotide
tgtatgggccgcgctaagtcagccggttcgtcaagtagcatcgttggcttcaaacatgctcaagccggtcgcaactatgc

SEQ ID NO: 5856 - DNA, 80 bp, Artificial Sequence
  Description of Artificial Sequence: Synthetic oligonucleotide
tgtatgggccgcgctaagtcagccggttcgtcaagtagcaagtgcagccttaagttccctcaagccggtcgcaactatgc

SEQ ID NO: 5857 - DNA, 80 bp, Artificial Sequence
  Description of Artificial Sequence: Synthetic oligonucleotide
tgtatgggccgcgctaagtcagccggttcgtcaagtagcacaggtctcaacaccactgcacaagccggtcgcaactatgc

SEQ ID NO: 5858 - DNA, 80 bp, Artificial Sequence
  Description of Artificial Sequence: Synthetic oligonucleotide
tgtatgggccgcgctaagtcagccggttcgtcaagtagcaaggaacacactggccggtgacaagccggtcgcaactatgc

SEQ ID NO: 5859 - DNA, 80 bp, Artificial Sequence
  Description of Artificial Sequence: Synthetic oligonucleotide
tgtatgggccgcgctaagtcagccggttcgtcaagtagcatgccccactgaaagatctcacaagccggtcgcaactatgc

SEQ ID NO: 5860 - DNA, 80 bp, Artificial Sequence
  Description of Artificial Sequence: Synthetic oligonucleotide
tgtatgggccgcgctaagtcagccggttcgtcaagtagcatggtgggcgattctctgagacaagccggtcgcaactatgc

SEQ ID NO: 5861 - DNA, 80 bp, Artificial Sequence
  Description of Artificial Sequence: Synthetic oligonucleotide
tgtatgggccgcgctaagtcagccggttcgtcaagtagcactagggtgtccagtgagtgtcaagccggtcgcaactatgc

SEQ ID NO: 5862 - DNA, 80 bp, Artificial Sequence
  Description of Artificial Sequence: Synthetic oligonucleotide
tgtatgggccgcgctaagtcagccggttcgtcaagtagcacactttgagaggccagtccccaagccggtcgcaactatgc

SEQ ID NO: 5863 - DNA, 80 bp, Artificial Sequence
  Description of Artificial Sequence: Synthetic oligonucleotide
tgtatgggccgcgctaagtcagccggttcgtcaagtagcagtgttgagtgcttacctcggcaagccggtcgcaactatgc

SEQ ID NO: 5864 - DNA, 80 bp, Artificial Sequence
  Description of Artificial Sequence: Synthetic oligonucleotide
tgtatgggccgcgctaagtcagccggttcgtcaagtagcaggtgcggttacgaaaggaatcaagccggtcgcaactatgc

SEQ ID NO: 5865 - DNA, 80 bp, Artificial Sequence
  Description of Artificial Sequence: Synthetic oligonucleotide
tgtatgggccgcgctaagtcagccggttcgtcaagtagcacccagggtcagttcagagatcaagccggtcgcaactatgc

SEQ ID NO: 5866 - DNA, 80 bp, Artificial Sequence
  Description of Artificial Sequence: Synthetic oligonucleotide
tgtatgggccgcgctaagtcagccggttcgtcaagtagcagctccaactcctgtcactctcaagccggtcgcaactatgc

SEQ ID NO: 5867 - DNA, 80 bp, Artificial Sequence
  Description of Artificial Sequence: Synthetic oligonucleotide
tgtatgggccgcgctaagtcagccggttcgtcaagtagcacctgctgattcacctgcacgcaagccggtcgcaactatgc

SEQ ID NO: 5868 - DNA, 80 bp, Artificial Sequence
  Description of Artificial Sequence: Synthetic oligonucleotide
tgtatgggccgcgctaagtcagccggttcgtcaagtagcagggacctactgacacccactcaagccggtcgcaactatgc

SEQ ID NO: 5869 - DNA, 80 bp, Artificial Sequence
  Description of Artificial Sequence: Synthetic oligonucleotide
tgtatgggccgcgctaagtcagccggttcgtcaagtagcaccatgtggcttcaccaacatcaagccggtcgcaactatgc

SEQ ID NO: 5870 - DNA, 80 bp, Artificial Sequence
  Description of Artificial Sequence: Synthetic oligonucleotide
tgtatgggccgcgctaagtcagccggttcgtcaagtagcaacctgacctgcatgttgtgtcaagccggtcgcaactatgc

SEQ ID NO: 5871 - DNA, 80 bp, Artificial Sequence
  Description of Artificial Sequence: Synthetic oligonucleotide
tgtatgggccgcgctaagtcagccggttcgtcaagtagcagcatcttctttcgggtgaggcaagccggtcgcaactatgc

SEQ ID NO: 5872 - DNA, 80 bp, Artificial Sequence
  Description of Artificial Sequence: Synthetic oligonucleotide
tgtatgggccgcgctaagtcagccggttcgtcaagtagcatcagcacctcctcgccatctcaagccggtcgcaactatgc

SEQ ID NO: 5873 - DNA, 80 bp, Artificial Sequence
  Description of Artificial Sequence: Synthetic oligonucleotide
tgtatgggccgcgctaagtcagccggttcgtcaagtagcaatctgctgaaggagtcctgccaagccggtcgcaactatgc

SEQ ID NO: 5874 - DNA, 80 bp, Artificial Sequence
  Description of Artificial Sequence: Synthetic oligonucleotide
tgtatgggccgcgctaagtcagccggttcgtcaagtagcatgcttcctcagtagcttccacaagccggtcgcaactatgc

SEQ ID NO: 5875 - DNA, 80 bp, Artificial Sequence
  Description of Artificial Sequence: Synthetic oligonucleotide
tgtatgggccgcgctaagtcagccggttcgtcaagtagcatttcttccttgcctggcattcaagccggtcgcaactatgc

SEQ ID NO: 5876 - DNA, 80 bp, Artificial Sequence
  Description of Artificial Sequence: Synthetic oligonucleotide
tgtatgggccgcgctaagtcagccggttcgtcaagtagcatccagagacagggttcttgccaagccggtcgcaactatgc

SEQ ID NO: 5877 - DNA, 80 bp, Artificial Sequence
  Description of Artificial Sequence: Synthetic oligonucleotide
tgtatgggccgcgctaagtcagccggttcgtcaagtagcacacggcaccagaatactgtccaagccggtcgcaactatgc

SEQ ID NO: 5878 - DNA, 80 bp, Artificial Sequence
  Description of Artificial Sequence: Synthetic oligonucleotide
tgtatgggccgcgctaagtcagccggttcgtcaagtagcacttgcacacttggtctgtgacaagccggtcgcaactatgc

SEQ ID NO: 5879 - DNA, 80 bp, Artificial Sequence
  Description of Artificial Sequence: Synthetic oligonucleotide
tgtatgggccgcgctaagtcagccggttcgtcaagtagcatgatctgcactgtacctgggcaagccggtcgcaactatgc

SEQ ID NO: 5880 - DNA, 80 bp, Artificial Sequence
  Description of Artificial Sequence: Synthetic oligonucleotide
tgtatgggccgcgctaagtcagccggttcgtcaagtagcaccaggtggctcaaactggagcaagccggtcgcaactatgc

SEQ ID NO: 5881 - DNA, 80 bp, Artificial Sequence
  Description of Artificial Sequence: Synthetic oligonucleotide
tgtatgggccgcgctaagtcagccggttcgtcaagtagcagcaccaccagcaacgaccagcaagccggtcgcaactatgc

SEQ ID NO: 5882 - DNA, 80 bp, Artificial Sequence
  Description of Artificial Sequence: Synthetic oligonucleotide
tgtatgggccgcgctaagtcagccggttcgtcaagtagcattgtagggcacatccagtcccaagccggtcgcaactatgc

SEQ ID NO: 5883 - DNA, 80 bp, Artificial Sequence
  Description of Artificial Sequence: Synthetic oligonucleotide
tgtatgggccgcgctaagtcagccggttcgtcaagtagcactctggccttgcacgtccaacaagccggtcgcaactatgc

SEQ ID NO: 5884 - DNA, 80 bp, Artificial Sequence
  Description of Artificial Sequence: Synthetic oligonucleotide
tgtatgggccgcgctaagtcagccggttcgtcaagtagcaggcacctgtccactctcaagcaagccggtcgcaactatgc

SEQ ID NO: 5885 - DNA, 80 bp, Artificial Sequence
  Description of Artificial Sequence: Synthetic oligonucleotide
tgtatgggccgcgctaagtcagccggttcgtcaagtagcaagtagaaagggcaaggtggtcaagccggtcgcaactatgc

SEQ ID NO: 5886 - DNA, 80 bp, Artificial Sequence
  Description of Artificial Sequence: Synthetic oligonucleotide
tgtatgggccgcgctaagtcagccggttcgtcaagtagcacttagggcatttgggctcaacaagccggtcgcaactatgc

SEQ ID NO: 5887 - DNA, 80 bp, Artificial Sequence
  Description of Artificial Sequence: Synthetic oligonucleotide
tgtatgggccgcgctaagtcagccggttcgtcaagtagcacctgggccctgtgtcgtatccaagccggtcgcaactatgc

SEQ ID NO: 5888 - DNA, 80 bp, Artificial Sequence
  Description of Artificial Sequence: Synthetic oligonucleotide
tgtatgggccgcgctaagtcagccggttcgtcaagtagcactctgctggaaggggtttggcaagccggtcgcaactatgc

SEQ ID NO: 5889 - DNA, 80 bp, Artificial Sequence
  Description of Artificial Sequence: Synthetic oligonucleotide
tgtatgggccgcgctaagtcagccggttcgtcaagtagcatacaccttgttgcagagtgccaagccggtcgcaactatgc

SEQ ID NO: 5890 - DNA, 80 bp, Artificial Sequence
  Description of Artificial Sequence: Synthetic oligonucleotide
tgtatgggccgcgctaagtcagccggttcgtcaagtagcaaggagcaaagacccataggccaagccggtcgcaactatgc

SEQ ID NO: 5891 - DNA, 80 bp, Artificial Sequence
  Description of Artificial Sequence: Synthetic oligonucleotide
tgtatgggccgcgctaagtcagccggttcgtcaagtagcagagtgcagtgcgacttactgcaagccggtcgcaactatgc

SEQ ID NO: 5892 - DNA, 80 bp, Artificial Sequence
  Description of Artificial Sequence: Synthetic oligonucleotide
tgtatgggccgcgctaagtcagccggttcgtcaagtagcaagtgccacccattgcctaaacaagccggtcgcaactatgc

SEQ ID NO: 5893 - DNA, 80 bp, Artificial Sequence
  Description of Artificial Sequence: Synthetic oligonucleotide
tgtatgggccgcgctaagtcagccggttcgtcaagtagcagaatccgaagacaggcctgacaagccggtcgcaactatgc

SEQ ID NO: 5894 - DNA, 80 bp, Artificial Sequence
  Description of Artificial Sequence: Synthetic oligonucleotide
tgtatgggccgcgctaagtcagccggttcgtcaagtagcaaggtagcaggctagccaacccaagccggtcgcaactatgc

SEQ ID NO: 5895 - DNA, 80 bp, Artificial Sequence
  Description of Artificial Sequence: Synthetic oligonucleotide
tgtatgggccgcgctaagtctgtatgccgagcggttcagtaggtgggtagaattcagcctcaagccggtcgcaactatgc

SEQ ID NO: 5896 - DNA, 80 bp, Artificial Sequence
  Description of Artificial Sequence: Synthetic oligonucleotide
tgtatgggccgcgctaagtctgtatgccgagcggttcagtaccaccctttgaaaatgcctcaagccggtcgcaactatgc

SEQ ID NO: 5897 - DNA, 80 bp, Artificial Sequence
  Description of Artificial Sequence: Synthetic oligonucleotide
tgtatgggccgcgctaagtctgtatgccgagcggttcagtagtctgagagagctcttgcacaagccggtcgcaactatgc

SEQ ID NO: 5898 - DNA, 80 bp, Artificial Sequence
  Description of Artificial Sequence: Synthetic oligonucleotide
tgtatgggccgcgctaagtctgtatgccgagcggttcagtaacttacctgctcttggggacaagccggtcgcaactatgc

SEQ ID NO: 5899 - DNA, 80 bp, Artificial Sequence
  Description of Artificial Sequence: Synthetic oligonucleotide
tgtatgggccgcgctaagtctgtatgccgagcggttcagttgcccttgcctagatcttcacaagccggtcgcaactatgc

SEQ ID NO: 5900 - DNA, 80 bp, Artificial Sequence
  Description of Artificial Sequence: Synthetic oligonucleotide
tgtatgggccgcgctaagtctgtatgccgagcggttcagtagaatgagtagcacgttgcgcaagccggtcgcaactatgc

SEQ ID NO: 5901 - DNA, 80 bp, Artificial Sequence
  Description of Artificial Sequence: Synthetic oligonucleotide
tgtatgggccgcgctaagtctgtatgccgagcggttcagtctggctgctcctactgcaagcaagccggtcgcaactatgc

SEQ ID NO: 5902 - DNA, 80 bp, Artificial Sequence
  Description of Artificial Sequence: Synthetic oligonucleotide
tgtatgggccgcgctaagtctgtatgccgagcggttcagtagtggagggattctcatggccaagccggtcgcaactatgc

SEQ ID NO: 5903 - DNA, 80 bp, Artificial Sequence
  Description of Artificial Sequence: Synthetic oligonucleotide
tgtatgggccgcgctaagtctgtatgccgagcggttcagtgcgtccaacgggcttcccagcaagccggtcgcaactatgc

SEQ ID NO: 5904 - DNA, 80 bp, Artificial Sequence
  Description of Artificial Sequence: Synthetic oligonucleotide
tgtatgggccgcgctaagtctgtatgccgagcggttcagttgtgggtttgcctagtccagcaagccggtcgcaactatgc

SEQ ID NO: 5905 - DNA, 80 bp, Artificial Sequence
  Description of Artificial Sequence: Synthetic oligonucleotide
tgtatgggccgcgctaagtcagccggttcgtcaagtagcaggtttgtttagggcccctttcaagccggtcgcaactatgc

SEQ ID NO: 5906 - DNA, 80 bp, Artificial Sequence
  Description of Artificial Sequence: Synthetic oligonucleotide
tgtatgggccgcgctaagtcagccggttcgtcaagtagcaagcaggtatttggaggagcacaagccggtcgcaactatgc

SEQ ID NO: 5907 - DNA, 80 bp, Artificial Sequence
  Description of Artificial Sequence: Synthetic oligonucleotide
tgtatgggccgcgctaagtcagccggttcgtcaagtagcagcaccggtgattggaagtgccaagccggtcgcaactatgc

SEQ ID NO: 5908 - DNA, 80 bp, Artificial Sequence
  Description of Artificial Sequence: Synthetic oligonucleotide
tgtatgggccgcgctaagtcagccggttcgtcaagtagcatggttaacagcccaaactgccaagccggtcgcaactatgc

SEQ ID NO: 5909 - DNA, 80 bp, Artificial Sequence
  Description of Artificial Sequence: Synthetic oligonucleotide
tgtatgggccgcgctaagtcagccggttcgtcaagtagcaagttgtgtgtatcgagcccacaagccggtcgcaactatgc

SEQ ID NO: 5910 - DNA, 80 bp, Artificial Sequence
  Description of Artificial Sequence: Synthetic oligonucleotide
tgtatgggccgcgctaagtcagccggttcgtcaagtagcaatagacatgcgtcagtcccacaagccggtcgcaactatgc

SEQ ID NO: 5911 - DNA, 80 bp, Artificial Sequence
  Description of Artificial Sequence: Synthetic oligonucleotide
tgtatgggccgcgctaagtcagccggttcgtcaagtagcattggagttgggttctggccgcaagccggtcgcaactatgc

SEQ ID NO: 5912 - DNA, 80 bp, Artificial Sequence
  Description of Artificial Sequence: Synthetic oligonucleotide
tgtatgggccgcgctaagtcagccggttcgtcaagtagcaacaaaacactgtgcatgccacaagccggtcgcaactatgc

SEQ ID NO: 5913 - DNA, 80 bp, Artificial Sequence
  Description of Artificial Sequence: Synthetic oligonucleotide
tgtatgggccgcgctaagtcagccggttcgtcaagtagcatgctaccagtctggggaaggcaagccggtcgcaactatgc

SEQ ID NO: 5914 - DNA, 80 bp, Artificial Sequence
  Description of Artificial Sequence: Synthetic oligonucleotide
tgtatgggccgcgctaagtcagccggttcgtcaagtagcaagtttgaggcatggtgctctcaagccggtcgcaactatgc

SEQ ID NO: 5915 - DNA, 80 bp, Artificial Sequence
  Description of Artificial Sequence: Synthetic oligonucleotide
tgtatgggccgcgctaagtcagccggttcgtcaagtagcatgaggtggaagcatgtctctcaagccggtcgcaactatgc

SEQ ID NO: 5916 - DNA, 80 bp, Artificial Sequence
  Description of Artificial Sequence: Synthetic oligonucleotide
tgtatgggccgcgctaagtcagccggttcgtcaagtagcaacattgccacgaagtttggtcaagccggtcgcaactatgc

SEQ ID NO: 5917 - DNA, 80 bp, Artificial Sequence
  Description of Artificial Sequence: Synthetic oligonucleotide
tgtatgggccgcgctaagtcagccggttcgtcaagtagcaccaccgttggcattctgtctcaagccggtcgcaactatgc

SEQ ID NO: 5918 - DNA, 80 bp, Artificial Sequence
  Description of Artificial Sequence: Synthetic oligonucleotide
tgtatgggccgcgctaagtcagccggttcgtcaagtagcacagttctcgctgctacctcacaagccggtcgcaactatgc

SEQ ID NO: 5919 - DNA, 80 bp, Artificial Sequence
  Description of Artificial Sequence: Synthetic oligonucleotide
tgtatgggccgcgctaagtcagccggttcgtcaagtagcaattgctgctgggttactgtgcaagccggtcgcaactatgc

SEQ ID NO: 5920 - DNA, 80 bp, Artificial Sequence
  Description of Artificial Sequence: Synthetic oligonucleotide
tgtatgggccgcgctaagtcagccggttcgtcaagtagcaaggcacaatctcgagctacacaagccggtcgcaactatgc

SEQ ID NO: 5921 - DNA, 80 bp, Artificial Sequence
  Description of Artificial Sequence: Synthetic oligonucleotide
tgtatgggccgcgctaagtcagccggttcgtcaagtagcaagggacgtgaagagtcatgacaagccggtcgcaactatgc

SEQ ID NO: 5922 - DNA, 80 bp, Artificial Sequence
  Description of Artificial Sequence: Synthetic oligonucleotide
tgtatgggccgcgctaagtcagccggttcgtcaagtagcactcaggcagggtgtagccgacaagccggtcgcaactatgc

SEQ ID NO: 5923 - DNA, 80 bp, Artificial Sequence
  Description of Artificial Sequence: Synthetic oligonucleotide
tgtatgggccgcgctaagtcagccggttcgtcaagtagcacacctaggctgcctcctgaacaagccggtcgcaactatgc

SEQ ID NO: 5924 - DNA, 80 bp, Artificial Sequence
  Description of Artificial Sequence: Synthetic oligonucleotide
tgtatgggccgcgctaagtcagccggttcgtcaagtagcaaccacagtcaatctgggagacaagccggtcgcaactatgc

SEQ ID NO: 5925 - DNA, 80 bp, Artificial Sequence
  Description of Artificial Sequence: Synthetic oligonucleotide
tgtatgggccgcgctaagtcagccggttcgtcaagtagcaagtggtgctagatggccctccaagccggtcgcaactatgc

SEQ ID NO: 5926 - DNA, 80 bp, Artificial Sequence
  Description of Artificial Sequence: Synthetic oligonucleotide
tgtatgggccgcgctaagtcagccggttcgtcaagtagcacagggaactgtcgtggtacccaagccggtcgcaactatgc

SEQ ID NO: 5927 - DNA, 80 bp, Artificial Sequence
  Description of Artificial Sequence: Synthetic oligonucleotide
tgtatgggccgcgctaagtcagccggttcgtcaagtagcacttgctccaaaatgctcgggcaagccggtcgcaactatgc

SEQ ID NO: 5928 - DNA, 80 bp, Artificial Sequence
  Description of Artificial Sequence: Synthetic oligonucleotide
tgtatgggccgcgctaagtcagccggttcgtcaagtagcacactggcttcccaactgtttcaagccggtcgcaactatgc

SEQ ID NO: 5929 - DNA, 80 bp, Artificial Sequence
  Description of Artificial Sequence: Synthetic oligonucleotide
tgtatgggccgcgctaagtcagccggttcgtcaagtagcagaccttcgcccttttcatcccaagccggtcgcaactatgc

SEQ ID NO: 5930 - DNA, 80 bp, Artificial Sequence
  Description of Artificial Sequence: Synthetic oligonucleotide
tgtatgggccgcgctaagtcagccggttcgtcaagtagcaaatccccatcctgaagacggcaagccggtcgcaactatgc

SEQ ID NO: 5931 - DNA, 80 bp, Artificial Sequence
  Description of Artificial Sequence: Synthetic oligonucleotide
tgtatgggccgcgctaagtcagccggttcgtcaagtagcaacagtgctgttcttgttgctcaagccggtcgcaactatgc

SEQ ID NO: 5932 - DNA, 80 bp, Artificial Sequence
  Description of Artificial Sequence: Synthetic oligonucleotide
tgtatgggccgcgctaagtcagccggttcgtcaagtagcataagctgttccctctctgctcaagccggtcgcaactatgc

SEQ ID NO: 5933 - DNA, 80 bp, Artificial Sequence
  Description of Artificial Sequence: Synthetic oligonucleotide
tgtatgggccgcgctaagtcagccggttcgtcaagtagcattggatcttggtattggcgccaagccggtcgcaactatgc

SEQ ID NO: 5934 - DNA, 80 bp, Artificial Sequence
  Description of Artificial Sequence: Synthetic oligonucleotide
tgtatgggccgcgctaagtcagccggttcgtcaagtagcaattgtgctgccttgtttggtcaagccggtcgcaactatgc

SEQ ID NO: 5935 - DNA, 80 bp, Artificial Sequence
  Description of Artificial Sequence: Synthetic oligonucleotide
tgtatgggccgcgctaagtcagccggttcgtcaagtagcaaggatttgcactaggctgggcaagccggtcgcaactatgc

SEQ ID NO: 5936 - DNA, 80 bp, Artificial Sequence
  Description of Artificial Sequence: Synthetic oligonucleotide
tgtatgggccgcgctaagtcagccggttcgtcaagtagcagggccttatgcaatggaactcaagccggtcgcaactatgc

SEQ ID NO: 5937 - DNA, 80 bp, Artificial Sequence
  Description of Artificial Sequence: Synthetic oligonucleotide
tgtatgggccgcgctaagtcagccggttcgtcaagtagcaagtcatactcgcccacatggcaagccggtcgcaactatgc

SEQ ID NO: 5938 - DNA, 80 bp, Artificial Sequence
  Description of Artificial Sequence: Synthetic oligonucleotide
tgtatgggccgcgctaagtcagccggttcgtcaagtagcacacaagtcttgcccacctgacaagccggtcgcaactatgc

SEQ ID NO: 5939 - DNA, 80 bp, Artificial Sequence
  Description of Artificial Sequence: Synthetic oligonucleotide
tgtatgggccgcgctaagtcagccggttcgtcaagtagcaccgttccagttaccgctgcccaagccggtcgcaactatgc

SEQ ID NO: 5940 - DNA, 80 bp, Artificial Sequence
  Description of Artificial Sequence: Synthetic oligonucleotide
tgtatgggccgcgctaagtcagccggttcgtcaagtagcatgctgaactccactagctcacaagccggtcgcaactatgc

SEQ ID NO: 5941 - DNA, 80 bp, Artificial Sequence
  Description of Artificial Sequence: Synthetic oligonucleotide
tgtatgggccgcgctaagtcagccggttcgtcaagtagcatgtgagcctgcaaacgtggtcaagccggtcgcaactatgc

SEQ ID NO: 5942 - DNA, 80 bp, Artificial Sequence
  Description of Artificial Sequence: Synthetic oligonucleotide
tgtatgggccgcgctaagtcagccggttcgtcaagtagcaaaatgtctgaggtggggactcaagccggtcgcaactatgc

SEQ ID NO: 5943 - DNA, 80 bp, Artificial Sequence
  Description of Artificial Sequence: Synthetic oligonucleotide
tgtatgggccgcgctaagtcagccggttcgtcaagtagcagggcaagagggagaagtgtacaagccggtcgcaactatgc

SEQ ID NO: 5944 - DNA, 80 bp, Artificial Sequence
  Description of Artificial Sequence: Synthetic oligonucleotide
tgtatgggccgcgctaagtcagccggttcgtcaagtagcaatgccagtggtcatgggagtcaagccggtcgcaactatgc

SEQ ID NO: 5945 - DNA, 80 bp, Artificial Sequence
  Description of Artificial Sequence: Synthetic oligonucleotide
tgtatgggccgcgctaagtcagccggttcgtcaagtagcattacgagcaaccaaaagccccaagccggtcgcaactatgc

SEQ ID NO: 5946 - DNA, 80 bp, Artificial Sequence
  Description of Artificial Sequence: Synthetic oligonucleotide
tgtatgggccgcgctaagtcagccggttcgtcaagtagcaccttacgccactgaaactcgcaagccggtcgcaactatgc

SEQ ID NO: 5947 - DNA, 80 bp, Artificial Sequence
  Description of Artificial Sequence: Synthetic oligonucleotide
tgtatgggccgcgctaagtcagccggttcgtcaagtagcacatcttgagatgaggctggccaagccggtcgcaactatgc

SEQ ID NO: 5948 - DNA, 80 bp, Artificial Sequence
  Description of Artificial Sequence: Synthetic oligonucleotide
tgtatgggccgcgctaagtctgtatgccgagcggttcagtgccctgaatcagagaacggacaagccggtcgcaactatgc

SEQ ID NO: 5949 - DNA, 80 bp, Artificial Sequence
  Description of Artificial Sequence: Synthetic oligonucleotide
tgtatgggccgcgctaagtctgtatgccgagcggttcagtgccatgtacacacagcagaacaagccggtcgcaactatgc

SEQ ID NO: 5950 - DNA, 80 bp, Artificial Sequence
  Description of Artificial Sequence: Synthetic oligonucleotide
tgtatgggccgcgctaagtctgtatgccgagcggttcagtaagagactctgggcatgaggcaagccggtcgcaactatgc

SEQ ID NO: 5951 - DNA, 80 bp, Artificial Sequence
  Description of Artificial Sequence: Synthetic oligonucleotide
tgtatgggccgcgctaagtctgtatgccgagcggttcagttgcaccaccaagtcctgctccaagccggtcgcaactatgc

SEQ ID NO: 5952 - DNA, 80 bp, Artificial Sequence
  Description of Artificial Sequence: Synthetic oligonucleotide
tgtatgggccgcgctaagtctgtatgccgagcggttcagtgctccagcttcttgatgcaacaagccggtcgcaactatgc

SEQ ID NO: 5953 - DNA, 80 bp, Artificial Sequence
  Description of Artificial Sequence: Synthetic oligonucleotide
tgtatgggccgcgctaagtctgtatgccgagcggttcagttgctctgactcaagtgacctcaagccggtcgcaactatgc

SEQ ID NO: 5954 - DNA, 80 bp, Artificial Sequence
  Description of Artificial Sequence: Synthetic oligonucleotide
tgtatgggccgcgctaagtctgtatgccgagcggttcagtgcattacccagacactcagccaagccggtcgcaactatgc

SEQ ID NO: 5955 - DNA, 80 bp, Artificial Sequence
  Description of Artificial Sequence: Synthetic oligonucleotide
tgtatgggccgcgctaagtctgtatgccgagcggttcagtactgcattccatttcgtgctcaagccggtcgcaactatgc

SEQ ID NO: 5956 - DNA, 80 bp, Artificial Sequence
  Description of Artificial Sequence: Synthetic oligonucleotide
tgtatgggccgcgctaagtctgtatgccgagcggttcagtaaaagctggccctttagtggcaagccggtcgcaactatgc

SEQ ID NO: 5957 - DNA, 80 bp, Artificial Sequence
  Description of Artificial Sequence: Synthetic oligonucleotide
tgtatgggccgcgctaagtctgtatgccgagcggttcagtagcaccctaactgacttccacaagccggtcgcaactatgc

SEQ ID NO: 5958 - DNA, 80 bp, Artificial Sequence
  Description of Artificial Sequence: Synthetic oligonucleotide
tgtatgggccgcgctaagtctgtatgccgagcggttcagtcccaaatggtgaggctagtgcaagccggtcgcaactatgc

SEQ ID NO: 5959 - DNA, 80 bp, Artificial Sequence
  Description of Artificial Sequence: Synthetic oligonucleotide
tgtatgggccgcgctaagtctgtatgccgagcggttcagttcagttgtctcccctgctgccaagccggtcgcaactatgc

SEQ ID NO: 5960 - DNA, 80 bp, Artificial Sequence
  Description of Artificial Sequence: Synthetic oligonucleotide
tgtatgggccgcgctaagtcagccggttcgtcaagtagcagctgcctccacctctgctatcaagccggtcgcaactatgc

SEQ ID NO: 5961 - DNA, 80 bp, Artificial Sequence
  Description of Artificial Sequence: Synthetic oligonucleotide
tgtatgggccgcgctaagtcagccggttcgtcaagtagcagatggagcagtggggaactacaagccggtcgcaactatgc

SEQ ID NO: 5962 - DNA, 80 bp, Artificial Sequence
  Description of Artificial Sequence: Synthetic oligonucleotide
tgtatgggccgcgctaagtcagccggttcgtcaagtagcagtgggagagaacgtcctggtcaagccggtcgcaactatgc

SEQ ID NO: 5963 - DNA, 80 bp, Artificial Sequence
  Description of Artificial Sequence: Synthetic oligonucleotide
tgtatgggccgcgctaagtcagccggttcgtcaagtagcactgacttcccattcccgtctcaagccggtcgcaactatgc

SEQ ID NO: 5964 - DNA, 80 bp, Artificial Sequence
  Description of Artificial Sequence: Synthetic oligonucleotide
tgtatgggccgcgctaagtcagccggttcgtcaagtagcatcttctgctcatgacccacccaagccggtcgcaactatgc

SEQ ID NO: 5965 - DNA, 80 bp, Artificial Sequence
  Description of Artificial Sequence: Synthetic oligonucleotide
tgtatgggccgcgctaagtcagccggttcgtcaagtagcacaagctgccacaaccatcctcaagccggtcgcaactatgc

SEQ ID NO: 5966 - DNA, 80 bp, Artificial Sequence
  Description of Artificial Sequence: Synthetic oligonucleotide
tgtatgggccgcgctaagtcagccggttcgtcaagtagcaagtgtacctggttatgcgcacaagccggtcgcaactatgc

SEQ ID NO: 5967 - DNA, 80 bp, Artificial Sequence
  Description of Artificial Sequence: Synthetic oligonucleotide
tgtatgggccgcgctaagtcagccggttcgtcaagtagcaggaacttgtgcttgctcactcaagccggtcgcaactatgc

SEQ ID NO: 5968 - DNA, 80 bp, Artificial Sequence
  Description of Artificial Sequence: Synthetic oligonucleotide
tgtatgggccgcgctaagtcagccggttcgtcaagtagcacacagtcagttgatgggtcgcaagccggtcgcaactatgc

SEQ ID NO: 5969 - DNA, 80 bp, Artificial Sequence
  Description of Artificial Sequence: Synthetic oligonucleotide
tgtatgggccgcgctaagtcagccggttcgtcaagtagcatgttagaccagaggccaacacaagccggtcgcaactatgc

SEQ ID NO: 5970 - DNA, 80 bp, Artificial Sequence
  Description of Artificial Sequence: Synthetic oligonucleotide
tgtatgggccgcgctaagtcagccggttcgtcaagtagcaccatgtcaatgcggagaagccaagccggtcgcaactatgc

SEQ ID NO: 5971 - DNA, 80 bp, Artificial Sequence
  Description of Artificial Sequence: Synthetic oligonucleotide
tgtatgggccgcgctaagtcagccggttcgtcaagtagcattagatgtgctggcatgtggcaagccggtcgcaactatgc

SEQ ID NO: 5972 - DNA, 80 bp, Artificial Sequence
  Description of Artificial Sequence: Synthetic oligonucleotide
tgtatgggccgcgctaagtcagccggttcgtcaagtagcaaagctgagtgacgagatggtcaagccggtcgcaactatgc

SEQ ID NO: 5973 - DNA, 80 bp, Artificial Sequence
  Description of Artificial Sequence: Synthetic oligonucleotide
tgtatgggccgcgctaagtcagccggttcgtcaagtagcagggctggccttttaaatggtcaagccggtcgcaactatgc

SEQ ID NO: 5974 - DNA, 80 bp, Artificial Sequence
  Description of Artificial Sequence: Synthetic oligonucleotide
tgtatgggccgcgctaagtcagccggttcgtcaagtagcagtctgatgcttgaacggcaccaagccggtcgcaactatgc

SEQ ID NO: 5975 - DNA, 80 bp, Artificial Sequence
  Description of Artificial Sequence: Synthetic oligonucleotide
tgtatgggccgcgctaagtcagccggttcgtcaagtagcatggcatccccagggacctgacaagccggtcgcaactatgc

SEQ ID NO: 5976 - DNA, 80 bp, Artificial Sequence
  Description of Artificial Sequence: Synthetic oligonucleotide
tgtatgggccgcgctaagtcagccggttcgtcaagtagcattagacagctggcaaccccacaagccggtcgcaactatgc

SEQ ID NO: 5977 - DNA, 80 bp, Artificial Sequence
  Description of Artificial Sequence: Synthetic oligonucleotide
tgtatgggccgcgctaagtcagccggttcgtcaagtagcaccctcttgacatccctgctacaagccggtcgcaactatgc

SEQ ID NO: 5978 - DNA, 80 bp, Artificial Sequence
  Description of Artificial Sequence: Synthetic oligonucleotide
tgtatgggccgcgctaagtcagccggttcgtcaagtagcatcagggtctggatctgtctgcaagccggtcgcaactatgc

SEQ ID NO: 5979 - DNA, 80 bp, Artificial Sequence
  Description of Artificial Sequence: Synthetic oligonucleotide
tgtatgggccgcgctaagtcagccggttcgtcaagtagcacagctgttcaattgccgtgtcaagccggtcgcaactatgc

SEQ ID NO: 5980 - DNA, 80 bp, Artificial Sequence
  Description of Artificial Sequence: Synthetic oligonucleotide
tgtatgggccgcgctaagtcagccggttcgtcaagtagcatgtatcccctgtgctcaaggcaagccggtcgcaactatgc

SEQ ID NO: 5981 - DNA, 80 bp, Artificial Sequence
  Description of Artificial Sequence: Synthetic oligonucleotide
tgtatgggccgcgctaagtcagccggttcgtcaagtagcaagaattgagctccccattgccaagccggtcgcaactatgc

SEQ ID NO: 5982 - DNA, 80 bp, Artificial Sequence
  Description of Artificial Sequence: Synthetic oligonucleotide
tgtatgggccgcgctaagtctgtatgccgagcggttcagtttgaatcaggacttccgcgacaagccggtcgcaactatgc

SEQ ID NO: 5983 - DNA, 80 bp, Artificial Sequence
  Description of Artificial Sequence: Synthetic oligonucleotide
tgtatgggccgcgctaagtctgtatgccgagcggttcagtttgatgacacacagcatgggcaagccggtcgcaactatgc

SEQ ID NO: 5984 - DNA, 80 bp, Artificial Sequence
  Description of Artificial Sequence: Synthetic oligonucleotide
tgtatgggccgcgctaagtctgtatgccgagcggttcagttaggctccaggcactgtatgcaagccggtcgcaactatgc

SEQ ID NO: 5985 - DNA, 80 bp, Artificial Sequence
  Description of Artificial Sequence: Synthetic oligonucleotide
tgtatgggccgcgctaagtctgtatgccgagcggttcagtgagggcagtagaagtgggagcaagccggtcgcaactatgc

SEQ ID NO: 5986 - DNA, 80 bp, Artificial Sequence
  Description of Artificial Sequence: Synthetic oligonucleotide
tgtatgggccgcgctaagtctgtatgccgagcggttcagtagaacctctgccctaggaaccaagccggtcgcaactatgc

SEQ ID NO: 5987 - DNA, 80 bp, Artificial Sequence
  Description of Artificial Sequence: Synthetic oligonucleotide
tgtatgggccgcgctaagtctgtatgccgagcggttcagttgttcgctaagcttgtcacccaagccggtcgcaactatgc

SEQ ID NO: 5988 - DNA, 80 bp, Artificial Sequence
  Description of Artificial Sequence: Synthetic oligonucleotide
tgtatgggccgcgctaagtctgtatgccgagcggttcagttcttctgttggataggggcacaagccggtcgcaactatgc

SEQ ID NO: 5989 - DNA, 80 bp, Artificial Sequence
  Description of Artificial Sequence: Synthetic oligonucleotide
tgtatgggccgcgctaagtctgtatgccgagcggttcagtccccagcaacctagagctatcaagccggtcgcaactatgc

SEQ ID NO: 5990 - DNA, 80 bp, Artificial Sequence
  Description of Artificial Sequence: Synthetic oligonucleotide
tgtatgggccgcgctaagtctgtatgccgagcggttcagttctgcaaagagggatcgtctcaagccggtcgcaactatgc

SEQ ID NO: 5991 - DNA, 80 bp, Artificial Sequence
  Description of Artificial Sequence: Synthetic oligonucleotide
tgtatgggccgcgctaagtcagccggttcgtcaagtagcaaggcatttggcgatgtagtgcaagccggtcgcaactatgc

SEQ ID NO: 5992 - DNA, 80 bp, Artificial Sequence
  Description of Artificial Sequence: Synthetic oligonucleotide
tgtatgggccgcgctaagtcagccggttcgtcaagtagcacatggctcatggagtgggaacaagccggtcgcaactatgc

SEQ ID NO: 5993 - DNA, 80 bp, Artificial Sequence
  Description of Artificial Sequence: Synthetic oligonucleotide
tgtatgggccgcgctaagtcagccggttcgtcaagtagcaagagctcccttcaatcaccacaagccggtcgcaactatgc

SEQ ID NO: 5994 - DNA, 80 bp, Artificial Sequence
  Description of Artificial Sequence: Synthetic oligonucleotide
tgtatgggccgcgctaagtcagccggttcgtcaagtagcatggactggctttcactttggcaagccggtcgcaactatgc

SEQ ID NO: 5995 - DNA, 80 bp, Artificial Sequence
  Description of Artificial Sequence: Synthetic oligonucleotide
tgtatgggccgcgctaagtcagccggttcgtcaagtagcaaggcaatacccttgtgaggacaagccggtcgcaactatgc

SEQ ID NO: 5996 - DNA, 80 bp, Artificial Sequence
  Description of Artificial Sequence: Synthetic oligonucleotide
tgtatgggccgcgctaagtcagccggttcgtcaagtagcatgaaacatcacaaggcctggcaagccggtcgcaactatgc

SEQ ID NO: 5997 - DNA, 80 bp, Artificial Sequence
  Description of Artificial Sequence: Synthetic oligonucleotide
tgtatgggccgcgctaagtcagccggttcgtcaagtagcaatctctggcaggaagaaggtcaagccggtcgcaactatgc

SEQ ID NO: 5998 - DNA, 80 bp, Artificial Sequence
  Description of Artificial Sequence: Synthetic oligonucleotide
tgtatgggccgcgctaagtcagccggttcgtcaagtagcaacaaagacagtcaaaggccccaagccggtcgcaactatgc

SEQ ID NO: 5999 - DNA, 80 bp, Artificial Sequence
  Description of Artificial Sequence: Synthetic oligonucleotide
tgtatgggccgcgctaagtcagccggttcgtcaagtagcactttgagcatacagtggggccaagccggtcgcaactatgc

SEQ ID NO: 6000 - DNA, 80 bp, Artificial Sequence
  Description of Artificial Sequence: Synthetic oligonucleotide
tgtatgggccgcgctaagtcagccggttcgtcaagtagcaaccaatgttgcgactgactccaagccggtcgcaactatgc

SEQ ID NO: 6001 - DNA, 80 bp, Artificial Sequence
  Description of Artificial Sequence: Synthetic oligonucleotide
tgtatgggccgcgctaagtcagccggttcgtcaagtagcattgagagcattttcgcaccccaagccggtcgcaactatgc

SEQ ID NO: 6002 - DNA, 80 bp, Artificial Sequence
  Description of Artificial Sequence: Synthetic oligonucleotide
tgtatgggccgcgctaagtcagccggttcgtcaagtagcaatcctgtaagcatccctcgccaagccggtcgcaactatgc

SEQ ID NO: 6003 - DNA, 80 bp, Artificial Sequence
  Description of Artificial Sequence: Synthetic oligonucleotide
tgtatgggccgcgctaagtcagccggttcgtcaagtagcactacttggattgctgcagcccaagccggtcgcaactatgc

SEQ ID NO: 6004 - DNA, 80 bp, Artificial Sequence
  Description of Artificial Sequence: Synthetic oligonucleotide
tgtatgggccgcgctaagtcagccggttcgtcaagtagcagggagcatgccacgcactttcaagccggtcgcaactatgc

SEQ ID NO: 6005 - DNA, 80 bp, Artificial Sequence
  Description of Artificial Sequence: Synthetic oligonucleotide
tgtatgggccgcgctaagtcagccggttcgtcaagtagcattgctctcacgttcctccgtcaagccggtcgcaactatgc

SEQ ID NO: 6006 - DNA, 80 bp, Artificial Sequence
  Description of Artificial Sequence: Synthetic oligonucleotide
tgtatgggccgcgctaagtcagccggttcgtcaagtagcatcaactgcaaaggcgatctgcaagccggtcgcaactatgc

SEQ ID NO: 6007 - DNA, 80 bp, Artificial Sequence
  Description of Artificial Sequence: Synthetic oligonucleotide
tgtatgggccgcgctaagtcagccggttcgtcaagtagcatctcaccttcaccaactcctcaagccggtcgcaactatgc

SEQ ID NO: 6008 - DNA, 80 bp, Artificial Sequence
  Description of Artificial Sequence: Synthetic oligonucleotide
tgtatgggccgcgctaagtcagccggttcgtcaagtagcaacaaaatcaggggctagcgacaagccggtcgcaactatgc

SEQ ID NO: 6009 - DNA, 80 bp, Artificial Sequence
  Description of Artificial Sequence: Synthetic oligonucleotide
tgtatgggccgcgctaagtcagccggttcgtcaagtagcacctctcctgcagtcagtcttcaagccggtcgcaactatgc

SEQ ID NO: 6010 - DNA, 80 bp, Artificial Sequence
  Description of Artificial Sequence: Synthetic oligonucleotide
tgtatgggccgcgctaagtcagccggttcgtcaagtagcatgctttcaagtttggcgagacaagccggtcgcaactatgc

SEQ ID NO: 6011 - DNA, 80 bp, Artificial Sequence
  Description of Artificial Sequence: Synthetic oligonucleotide
tgtatgggccgcgctaagtcagccggttcgtcaagtagcaactgttcctttcttggcacccaagccggtcgcaactatgc

SEQ ID NO: 6012 - DNA, 80 bp, Artificial Sequence
  Description of Artificial Sequence: Synthetic oligonucleotide
tgtatgggccgcgctaagtcagccggttcgtcaagtagcaggctggatcctgcacactctcaagccggtcgcaactatgc

SEQ ID NO: 6013 - DNA, 80 bp, Artificial Sequence
  Description of Artificial Sequence: Synthetic oligonucleotide
tgtatgggccgcgctaagtcagccggttcgtcaagtagcaagcccacgtaaaagttcagccaagccggtcgcaactatgc

SEQ ID NO: 6014 - DNA, 80 bp, Artificial Sequence
  Description of Artificial Sequence: Synthetic oligonucleotide
tgtatgggccgcgctaagtcagccggttcgtcaagtagcatccttggccattgaagctcacaagccggtcgcaactatgc

SEQ ID NO: 6015 - DNA, 80 bp, Artificial Sequence
  Description of Artificial Sequence: Synthetic oligonucleotide
tgtatgggccgcgctaagtcagccggttcgtcaagtagcattcacttgtcagctcagcaccaagccggtcgcaactatgc

SEQ ID NO: 6016 - DNA, 80 bp, Artificial Sequence
  Description of Artificial Sequence: Synthetic oligonucleotide
tgtatgggccgcgctaagtcagccggttcgtcaagtagcaaacaaaggagttccaggccccaagccggtcgcaactatgc

SEQ ID NO: 6017 - DNA, 80 bp, Artificial Sequence
  Description of Artificial Sequence: Synthetic oligonucleotide
tgtatgggccgcgctaagtcagccggttcgtcaagtagcagcagactttgacacaggacccaagccggtcgcaactatgc

SEQ ID NO: 6018 - DNA, 80 bp, Artificial Sequence
  Description of Artificial Sequence: Synthetic oligonucleotide
tgtatgggccgcgctaagtctgtatgccgagcggttcagttggatggaaaaggctgaacccaagccggtcgcaactatgc

SEQ ID NO: 6019 - DNA, 80 bp, Artificial Sequence
  Description of Artificial Sequence: Synthetic oligonucleotide
tgtatgggccgcgctaagtctgtatgccgagcggttcagtgctggggattgtggtgattccaagccggtcgcaactatgc

SEQ ID NO: 6020 - DNA, 80 bp, Artificial Sequence
  Description of Artificial Sequence: Synthetic oligonucleotide
tgtatgggccgcgctaagtctgtatgccgagcggttcagtaagaccacaacaccaaggcccaagccggtcgcaactatgc

SEQ ID NO: 6021 - DNA, 80 bp, Artificial Sequence
  Description of Artificial Sequence: Synthetic oligonucleotide
tgtatgggccgcgctaagtctgtatgccgagcggttcagtgtgtgacctgcaaagtggctcaagccggtcgcaactatgc

SEQ ID NO: 6022 - DNA, 80 bp, Artificial Sequence
  Description of Artificial Sequence: Synthetic oligonucleotide
tgtatgggccgcgctaagtctgtatgccgagcggttcagtatggctgcacacatttgtctcaagccggtcgcaactatgc

SEQ ID NO: 6023 - DNA, 80 bp, Artificial Sequence
  Description of Artificial Sequence: Synthetic oligonucleotide
tgtatgggccgcgctaagtctgtatgccgagcggttcagttccgaaaccaaataccgctgcaagccggtcgcaactatgc

SEQ ID NO: 6024 - DNA, 80 bp, Artificial Sequence
  Description of Artificial Sequence: Synthetic oligonucleotide
tgtatgggccgcgctaagtctgtatgccgagcggttcagttctggacacacacaagcccgcaagccggtcgcaactatgc

SEQ ID NO: 6025 - DNA, 80 bp, Artificial Sequence
  Description of Artificial Sequence: Synthetic oligonucleotide
tgtatgggccgcgctaagtctgtatgccgagcggttcagttctccgatgctactttgcctcaagccggtcgcaactatgc

SEQ ID NO: 6026 - DNA, 80 bp, Artificial Sequence
  Description of Artificial Sequence: Synthetic oligonucleotide
tgtatgggccgcgctaagtctgtatgccgagcggttcagtagagctgtcacattggaccccaagccggtcgcaactatgc

SEQ ID NO: 6027 - DNA, 80 bp, Artificial Sequence
  Description of Artificial Sequence: Synthetic oligonucleotide
tgtatgggccgcgctaagtctgtatgccgagcggttcagtgtggcaacagttggcaggtccaagccggtcgcaactatgc

SEQ ID NO: 6028 - DNA, 80 bp, Artificial Sequence
  Description of Artificial Sequence: Synthetic oligonucleotide
tgtatgggccgcgctaagtcagccggttcgtcaagtagcaactctgggccctctctcttgcaagccggtcgcaactatgc

SEQ ID NO: 6029 - DNA, 80 bp, Artificial Sequence
  Description of Artificial Sequence: Synthetic oligonucleotide
tgtatgggccgcgctaagtcagccggttcgtcaagtagcaagcatcgtgtccacatatgccaagccggtcgcaactatgc

SEQ ID NO: 6030 - DNA, 80 bp, Artificial Sequence
  Description of Artificial Sequence: Synthetic oligonucleotide
tgtatgggccgcgctaagtcagccggttcgtcaagtagcatgttcctgccctggctcattcaagccggtcgcaactatgc

SEQ ID NO: 6031 - DNA, 80 bp, Artificial Sequence
  Description of Artificial Sequence: Synthetic oligonucleotide
tgtatgggccgcgctaagtcagccggttcgtcaagtagcaaagaaaccgttgcagtcgtccaagccggtcgcaactatgc

SEQ ID NO: 6032 - DNA, 80 bp, Artificial Sequence
  Description of Artificial Sequence: Synthetic oligonucleotide
tgtatgggccgcgctaagtcagccggttcgtcaagtagcatcccaatcagtgctgtttgccaagccggtcgcaactatgc

SEQ ID NO: 6033 - DNA, 80 bp, Artificial Sequence
  Description of Artificial Sequence: Synthetic oligonucleotide
tgtatgggccgcgctaagtcagccggttcgtcaagtagcacttgtgccagcaagtgaaggcaagccggtcgcaactatgc

SEQ ID NO: 6034 - DNA, 80 bp, Artificial Sequence
  Description of Artificial Sequence: Synthetic oligonucleotide
tgtatgggccgcgctaagtcagccggttcgtcaagtagcaacttgcctatgtgtgtgccacaagccggtcgcaactatgc

SEQ ID NO: 6035 - DNA, 80 bp, Artificial Sequence
  Description of Artificial Sequence: Synthetic oligonucleotide
tgtatgggccgcgctaagtcagccggttcgtcaagtagcagcttgctggcaaagagacatcaagccggtcgcaactatgc

SEQ ID NO: 6036 - DNA, 80 bp, Artificial Sequence
  Description of Artificial Sequence: Synthetic oligonucleotide
tgtatgggccgcgctaagtcagccggttcgtcaagtagcaactgctgccccaggtatcctcaagccggtcgcaactatgc

SEQ ID NO: 6037 - DNA, 80 bp, Artificial Sequence
  Description of Artificial Sequence: Synthetic oligonucleotide
tgtatgggccgcgctaagtcagccggttcgtcaagtagcatgcccaaggtagcccaactacaagccggtcgcaactatgc

SEQ ID NO: 6038 - DNA, 80 bp, Artificial Sequence
  Description of Artificial Sequence: Synthetic oligonucleotide
tgtatgggccgcgctaagtcagccggttcgtcaagtagcagtaccctaccccacagatgccaagccggtcgcaactatgc

SEQ ID NO: 6039 - DNA, 80 bp, Artificial Sequence
  Description of Artificial Sequence: Synthetic oligonucleotide
tgtatgggccgcgctaagtcagccggttcgtcaagtagcaatttctcagactcgggagcacaagccggtcgcaactatgc

SEQ ID NO: 6040 - DNA, 80 bp, Artificial Sequence
  Description of Artificial Sequence: Synthetic oligonucleotide
tgtatgggccgcgctaagtcagccggttcgtcaagtagcatccaaccctgagcattccttcaagccggtcgcaactatgc

SEQ ID NO: 6041 - DNA, 80 bp, Artificial Sequence
  Description of Artificial Sequence: Synthetic oligonucleotide
tgtatgggccgcgctaagtcagccggttcgtcaagtagcagcttcaggaaaggaaccacccaagccggtcgcaactatgc

SEQ ID NO: 6042 - DNA, 80 bp, Artificial Sequence
  Description of Artificial Sequence: Synthetic oligonucleotide
tgtatgggccgcgctaagtcagccggttcgtcaagtagcaaggtagtgtgccccttctcacaagccggtcgcaactatgc

SEQ ID NO: 6043 - DNA, 80 bp, Artificial Sequence
  Description of Artificial Sequence: Synthetic oligonucleotide
tgtatgggccgcgctaagtcagccggttcgtcaagtagcaataacctgtggactgcctgccaagccggtcgcaactatgc

SEQ ID NO: 6044 - DNA, 80 bp, Artificial Sequence
  Description of Artificial Sequence: Synthetic oligonucleotide
tgtatgggccgcgctaagtcagccggttcgtcaagtagcaccctactacccctgggctgacaagccggtcgcaactatgc

SEQ ID NO: 6045 - DNA, 80 bp, Artificial Sequence
  Description of Artificial Sequence: Synthetic oligonucleotide
tgtatgggccgcgctaagtcagccggttcgtcaagtagcaccaagtgggcaaagcttaggcaagccggtcgcaactatgc

SEQ ID NO: 6046 - DNA, 80 bp, Artificial Sequence
  Description of Artificial Sequence: Synthetic oligonucleotide
tgtatgggccgcgctaagtcagccggttcgtcaagtagcaggaagttggttgtccagacccaagccggtcgcaactatgc

SEQ ID NO: 6047 - DNA, 80 bp, Artificial Sequence
  Description of Artificial Sequence: Synthetic oligonucleotide
tgtatgggccgcgctaagtcagccggttcgtcaagtagcatcctttaagtctggctggctcaagccggtcgcaactatgc

SEQ ID NO: 6048 - DNA, 80 bp, Artificial Sequence
  Description of Artificial Sequence: Synthetic oligonucleotide
tgtatgggccgcgctaagtcagccggttcgtcaagtagcaactgagattaaggaggcccacaagccggtcgcaactatgc

SEQ ID NO: 6049 - DNA, 80 bp, Artificial Sequence
  Description of Artificial Sequence: Synthetic oligonucleotide
tgtatgggccgcgctaagtcagccggttcgtcaagtagcactgtccctggggaaccatgtcaagccggtcgcaactatgc

SEQ ID NO: 6050 - DNA, 80 bp, Artificial Sequence
  Description of Artificial Sequence: Synthetic oligonucleotide
tgtatgggccgcgctaagtctgtatgccgagcggttcagtgagcaggaagattgggcatgcaagccggtcgcaactatgc

SEQ ID NO: 6051 - DNA, 80 bp, Artificial Sequence
  Description of Artificial Sequence: Synthetic oligonucleotide
tgtatgggccgcgctaagtctgtatgccgagcggttcagttagcagaccagcacacagggcaagccggtcgcaactatgc

SEQ ID NO: 6052 - DNA, 80 bp, Artificial Sequence
  Description of Artificial Sequence: Synthetic oligonucleotide
tgtatgggccgcgctaagtctgtatgccgagcggttcagtggactgggtttgaaacaccacaagccggtcgcaactatgc

SEQ ID NO: 6053 - DNA, 80 bp, Artificial Sequence
  Description of Artificial Sequence: Synthetic oligonucleotide
tgtatgggccgcgctaagtctgtatgccgagcggttcagttgcagcgttttgaagacactcaagccggtcgcaactatgc

SEQ ID NO: 6054 - DNA, 80 bp, Artificial Sequence
  Description of Artificial Sequence: Synthetic oligonucleotide
tgtatgggccgcgctaagtctgtatgccgagcggttcagtgccctgactggaatccatgccaagccggtcgcaactatgc

SEQ ID NO: 6055 - DNA, 80 bp, Artificial Sequence
  Description of Artificial Sequence: Synthetic oligonucleotide
tgtatgggccgcgctaagtctgtatgccgagcggttcagtaactgggacacctactgaggcaagccggtcgcaactatgc

SEQ ID NO: 6056 - DNA, 80 bp, Artificial Sequence
  Description of Artificial Sequence: Synthetic oligonucleotide
tgtatgggccgcgctaagtctgtatgccgagcggttcagttgtgaccttcaacctgccctcaagccggtcgcaactatgc

SEQ ID NO: 6057 - DNA, 80 bp, Artificial Sequence
  Description of Artificial Sequence: Synthetic oligonucleotide
tgtatgggccgcgctaagtctgtatgccgagcggttcagttggcctgatggttgaattgccaagccggtcgcaactatgc

SEQ ID NO: 6058 - DNA, 80 bp, Artificial Sequence
  Description of Artificial Sequence: Synthetic oligonucleotide
tgtatgggccgcgctaagtcagccggttcgtcaagtagcaatggggaatgagcctaccaacaagccggtcgcaactatgc

SEQ ID NO: 6059 - DNA, 80 bp, Artificial Sequence
  Description of Artificial Sequence: Synthetic oligonucleotide
tgtatgggccgcgctaagtcagccggttcgtcaagtagcattcacaggaatccagagccacaagccggtcgcaactatgc

SEQ ID NO: 6060 - DNA, 80 bp, Artificial Sequence
  Description of Artificial Sequence: Synthetic oligonucleotide
tgtatgggccgcgctaagtcagccggttcgtcaagtagcagcctacgagaaagaatgggccaagccggtcgcaactatgc

SEQ ID NO: 6061 - DNA, 80 bp, Artificial Sequence
  Description of Artificial Sequence: Synthetic oligonucleotide
tgtatgggccgcgctaagtcagccggttcgtcaagtagcatccccataaaagcatgctggcaagccggtcgcaactatgc

SEQ ID NO: 6062 - DNA, 80 bp, Artificial Sequence
  Description of Artificial Sequence: Synthetic oligonucleotide
tgtatgggccgcgctaagtcagccggttcgtcaagtagcagccattggactaagggtcaccaagccggtcgcaactatgc

SEQ ID NO: 6063 - DNA, 80 bp, Artificial Sequence
  Description of Artificial Sequence: Synthetic oligonucleotide
tgtatgggccgcgctaagtcagccggttcgtcaagtagcagaaggagttgaaccagcaggcaagccggtcgcaactatgc

SEQ ID NO: 6064 - DNA, 80 bp, Artificial Sequence
  Description of Artificial Sequence: Synthetic oligonucleotide
tgtatgggccgcgctaagtcagccggttcgtcaagtagcatggaggacttttgggagagtcaagccggtcgcaactatgc

SEQ ID NO: 6065 - DNA, 80 bp, Artificial Sequence
  Description of Artificial Sequence: Synthetic oligonucleotide
tgtatgggccgcgctaagtcagccggttcgtcaagtagcaatgtggacctcttcagagctcaagccggtcgcaactatgc

SEQ ID NO: 6066 - DNA, 80 bp, Artificial Sequence
  Description of Artificial Sequence: Synthetic oligonucleotide
tgtatgggccgcgctaagtcagccggttcgtcaagtagcacaaagcagggcctctacatccaagccggtcgcaactatgc

SEQ ID NO: 6067 - DNA, 80 bp, Artificial Sequence
  Description of Artificial Sequence: Synthetic oligonucleotide
tgtatgggccgcgctaagtcagccggttcgtcaagtagcaagttcacccagggagtatgccaagccggtcgcaactatgc

SEQ ID NO: 6068 - DNA, 80 bp, Artificial Sequence
  Description of Artificial Sequence: Synthetic oligonucleotide
tgtatgggccgcgctaagtcagccggttcgtcaagtagcatgtgtcgctgctccacttttcaagccggtcgcaactatgc

SEQ ID NO: 6069 - DNA, 80 bp, Artificial Sequence
  Description of Artificial Sequence: Synthetic oligonucleotide
tgtatgggccgcgctaagtctgtatgccgagcggttcagtgaaccactgaaccatgggaccaagccggtcgcaactatgc

SEQ ID NO: 6070 - DNA, 80 bp, Artificial Sequence
  Description of Artificial Sequence: Synthetic oligonucleotide
tgtatgggccgcgctaagtctgtatgccgagcggttcagtagaatgtgctatggtggggtcaagccggtcgcaactatgc

SEQ ID NO: 6071 - DNA, 80 bp, Artificial Sequence
  Description of Artificial Sequence: Synthetic oligonucleotide
tgtatgggccgcgctaagtctgtatgccgagcggttcagtccttgccccagtcagtgtcacaagccggtcgcaactatgc

SEQ ID NO: 6072 - DNA, 80 bp, Artificial Sequence
  Description of Artificial Sequence: Synthetic oligonucleotide
tgtatgggccgcgctaagtctgtatgccgagcggttcagtcaggaagtgggtcggctcctcaagccggtcgcaactatgc

SEQ ID NO: 6073 - DNA, 80 bp, Artificial Sequence
  Description of Artificial Sequence: Synthetic oligonucleotide
tgtatgggccgcgctaagtctgtatgccgagcggttcagtaaagactgggtcacctcagccaagccggtcgcaactatgc

SEQ ID NO: 6074 - DNA, 80 bp, Artificial Sequence
  Description of Artificial Sequence: Synthetic oligonucleotide
tgtatgggccgcgctaagtcagccggttcgtcaagtagcaaagtgctgtcttgcctctgtcaagccggtcgcaactatgc

SEQ ID NO: 6075 - DNA, 80 bp, Artificial Sequence
  Description of Artificial Sequence: Synthetic oligonucleotide
tgtatgggccgcgctaagtcagccggttcgtcaagtagcagcacccacctggcttttagccaagccggtcgcaactatgc

SEQ ID NO: 6076 - DNA, 80 bp, Artificial Sequence
  Description of Artificial Sequence: Synthetic oligonucleotide
tgtatgggccgcgctaagtctgtatgccgagcggttcagttctgtaatctcagggtggcacaagccggtcgcaactatgc

SEQ ID NO: 6077 - DNA, 80 bp, Artificial Sequence
  Description of Artificial Sequence: Synthetic oligonucleotide
tgtatgggccgcgctaagtctgtatgccgagcggttcagtccaaaggcaatgtgtgttgccaagccggtcgcaactatgc

SEQ ID NO: 6078 - DNA, 80 bp, Artificial Sequence
  Description of Artificial Sequence: Synthetic oligonucleotide
tgtatgggccgcgctaagtctgtatgccgagcggttcagtcatgtgctgtgactgcagagcaagccggtcgcaactatgc

SEQ ID NO: 6079 - DNA, 80 bp, Artificial Sequence
  Description of Artificial Sequence: Synthetic oligonucleotide
tgtatgggccgcgctaagtctgtatgccgagcggttcagtacgttgctttccatgttgcacaagccggtcgcaactatgc

SEQ ID NO: 6080 - DNA, 80 bp, Artificial Sequence
  Description of Artificial Sequence: Synthetic oligonucleotide
tgtatgggccgcgctaagtctgtatgccgagcggttcagttcattgtgatttggcgtgcccaagccggtcgcaactatgc

SEQ ID NO: 6081 - DNA, 80 bp, Artificial Sequence
  Description of Artificial Sequence: Synthetic oligonucleotide
tgtatgggccgcgctaagtctgtatgccgagcggttcagttggtacattctgagtgggcacaagccggtcgcaactatgc

SEQ ID NO: 6082 - DNA, 80 bp, Artificial Sequence
  Description of Artificial Sequence: Synthetic oligonucleotide
tgtatgggccgcgctaagtctgtatgccgagcggttcagtcagactagggtgctggtgctcaagccggtcgcaactatgc

SEQ ID NO: 6083 - DNA, 80 bp, Artificial Sequence
  Description of Artificial Sequence: Synthetic oligonucleotide
tgtatgggccgcgctaagtctgtatgccgagcggttcagtagcaaaactgtatgtgcgcgcaagccggtcgcaactatgc

SEQ ID NO: 6084 - DNA, 80 bp, Artificial Sequence
  Description of Artificial Sequence: Synthetic oligonucleotide
tgtatgggccgcgctaagtctgtatgccgagcggttcagtcacttggatggtggcagccacaagccggtcgcaactatgc

SEQ ID NO: 6085 - DNA, 80 bp, Artificial Sequence
  Description of Artificial Sequence: Synthetic oligonucleotide
tgtatgggccgcgctaagtcagccggttcgtcaagtagcaccatgcagaagggctaacagcaagccggtcgcaactatgc

SEQ ID NO: 6086 - DNA, 80 bp, Artificial Sequence
  Description of Artificial Sequence: Synthetic oligonucleotide
tgtatgggccgcgctaagtcagccggttcgtcaagtagcagcttgtggttttgcccattccaagccggtcgcaactatgc

SEQ ID NO: 6087 - DNA, 80 bp, Artificial Sequence
  Description of Artificial Sequence: Synthetic oligonucleotide
tgtatgggccgcgctaagtcagccggttcgtcaagtagcaattttgccgagagactgcaccaagccggtcgcaactatgc

SEQ ID NO: 6088 - DNA, 80 bp, Artificial Sequence
  Description of Artificial Sequence: Synthetic oligonucleotide
tgtatgggccgcgctaagtcagccggttcgtcaagtagcaaggcaaggcagattgggacccaagccggtcgcaactatgc

SEQ ID NO: 6089 - DNA, 80 bp, Artificial Sequence
  Description of Artificial Sequence: Synthetic oligonucleotide
tgtatgggccgcgctaagtcagccggttcgtcaagtagcagaggaccgataaatgcaccccaagccggtcgcaactatgc

SEQ ID NO: 6090 - DNA, 80 bp, Artificial Sequence
  Description of Artificial Sequence: Synthetic oligonucleotide
tgtatgggccgcgctaagtcagccggttcgtcaagtagcaatacagcagaggttccaggccaagccggtcgcaactatgc

SEQ ID NO: 6091 - DNA, 80 bp, Artificial Sequence
  Description of Artificial Sequence: Synthetic oligonucleotide
tgtatgggccgcgctaagtcagccggttcgtcaagtagcatgaccctgaattgtggagggcaagccggtcgcaactatgc

SEQ ID NO: 6092 - DNA, 80 bp, Artificial Sequence
  Description of Artificial Sequence: Synthetic oligonucleotide
tgtatgggccgcgctaagtcagccggttcgtcaagtagcaggggaactgacaagccaaagcaagccggtcgcaactatgc

SEQ ID NO: 6093 - DNA, 80 bp, Artificial Sequence
  Description of Artificial Sequence: Synthetic oligonucleotide
tgtatgggccgcgctaagtcagccggttcgtcaagtagcactgcatgggacacagtcacccaagccggtcgcaactatgc

SEQ ID NO: 6094 - DNA, 80 bp, Artificial Sequence
  Description of Artificial Sequence: Synthetic oligonucleotide
tgtatgggccgcgctaagtctgtatgccgagcggttcagtacggcttgagtcaaccaaaccaagccggtcgcaactatgc

SEQ ID NO: 6095 - DNA, 80 bp, Artificial Sequence
  Description of Artificial Sequence: Synthetic oligonucleotide
tgtatgggccgcgctaagtctgtatgccgagcggttcagttccccagagaagagacttgccaagccggtcgcaactatgc

SEQ ID NO: 6096 - DNA, 80 bp, Artificial Sequence
  Description of Artificial Sequence: Synthetic oligonucleotide
tgtatgggccgcgctaagtctgtatgccgagcggttcagtatgtgttttgggctgagggacaagccggtcgcaactatgc

SEQ ID NO: 6097 - DNA, 80 bp, Artificial Sequence
  Description of Artificial Sequence: Synthetic oligonucleotide
tgtatgggccgcgctaagtctgtatgccgagcggttcagtccccatgttctgattgtccccaagccggtcgcaactatgc

SEQ ID NO: 6098 - DNA, 80 bp, Artificial Sequence
  Description of Artificial Sequence: Synthetic oligonucleotide
tgtatgggccgcgctaagtctgtatgccgagcggttcagtctgcggcagagatcccagagcaagccggtcgcaactatgc

SEQ ID NO: 6099 - DNA, 80 bp, Artificial Sequence
  Description of Artificial Sequence: Synthetic oligonucleotide
tgtatgggccgcgctaagtcagccggttcgtcaagtagcaaccaagctcccagtcgacctcaagccggtcgcaactatgc

SEQ ID NO: 6100 - DNA, 80 bp, Artificial Sequence
  Description of Artificial Sequence: Synthetic oligonucleotide
tgtatgggccgcgctaagtctgtatgccgagcggttcagtaggcatcttccgaaaactgccaagccggtcgcaactatgc

SEQ ID NO: 6101 - DNA, 80 bp, Artificial Sequence
  Description of Artificial Sequence: Synthetic oligonucleotide
tgtatgggccgcgctaagtctgtatgccgagcggttcagtcccaggcttcgaatttgtcccaagccggtcgcaactatgc

SEQ ID NO: 6102 - DNA, 80 bp, Artificial Sequence
  Description of Artificial Sequence: Synthetic oligonucleotide
tgtatgggccgcgctaagtctgtatgccgagcggttcagtgggtgacacactgttgcagtcaagccggtcgcaactatgc

SEQ ID NO: 6103 - DNA, 80 bp, Artificial Sequence
  Description of Artificial Sequence: Synthetic oligonucleotide
tgtatgggccgcgctaagtctgtatgccgagcggttcagttgaattctgatggtgcaggccaagccggtcgcaactatgc

SEQ ID NO: 6104 - DNA, 80 bp, Artificial Sequence
  Description of Artificial Sequence: Synthetic oligonucleotide
tgtatgggccgcgctaagtctgtatgccgagcggttcagtatttcggatcagcctcgactcaagccggtcgcaactatgc

SEQ ID NO: 6105 - RNA, 38 nt, Artificial Sequence
  Description of Artificial Sequence: Synthetic oligonucleotide
gcaagccuugaaaauacaccguuuuagagcuaugcugu

SEQ ID NO: 6106 - RNA, 38 nt, Artificial Sequence
  Description of Artificial Sequence: Synthetic oligonucleotide
guagcuagcauuauauuuacguuuuagagcuaugcugu

SEQ ID NO: 6107 - RNA, 38 nt, Artificial Sequence
  Description of Artificial Sequence: Synthetic oligonucleotide
gguacauucuuuauaaauuuguuuuagagcuaugcugu

SEQ ID NO: 6108 - RNA, 38 nt, Artificial Sequence
  Description of Artificial Sequence: Synthetic oligonucleotide
gacuguuucuuaaaaugaaaguuuuagagcuaugcugu

SEQ ID NO: 6109 - RNA, 48 nt, Artificial Sequence
  Description of Artificial Sequence: Synthetic oligonucleotide
gggaugaauagcaagccuugaaaauacaccguuuuagagcuaugcugu

SEQ ID NO: 6110 - RNA, 48 nt, Artificial Sequence
  Description of Artificial Sequence: Synthetic oligonucleotide
gggaugaauaguagcuagcauuauauuuacguuuuagagcuaugcugu

SEQ ID NO: 6111 - RNA, 48 nt, Artificial Sequence
  Description of Artificial Sequence: Synthetic oligonucleotide
gggaugaauagguacauucuuuauaaauuuguuuuagagcuaugcugu

SEQ ID NO: 6112 - RNA, 48 nt, Artificial Sequence
  Description of Artificial Sequence: Synthetic oligonucleotide
gggaugaauagacuguuucuuaaaaugaaaguuuuagagcuaugcugu

SEQ ID NO: 6113 - DNA, 22 bp, Artificial Sequence
  Description of Artificial Sequence: Synthetic oligonucleotide
gaaattaatacgactcactata

SEQ ID NO: 6114 - DNA, 70 bp, Artificial Sequence
  Description of Artificial Sequence: Synthetic oligonucleotide
acagcatagctctaaaactttcattttaagaaacagtctattcatccctatagtgagtcgtattaatttc

SEQ ID NO: 6115 - DNA, 23 bp, Homo sapiens
gagccacttctctgaaggccagg

SEQ ID NO: 6116 - RNA, 21 nt, Artificial Sequence
  Description of Artificial Sequence: Synthetic oligonucleotide
ggagccauuucucugaaggcc

SEQ ID NO: 6117 - RNA, 21 nt, Artificial Sequence
  Description of Artificial Sequence: Synthetic oligonucleotide
ggagccaucucucugaaggcc

SEQ ID NO: 6118 - DNA, 23 bp, Homo sapiens
gtgggcggacccatctcctctgg

SEQ ID NO: 6119 - DNA, 21 bp, Artificial Sequence
  Description of Artificial Sequence: Synthetic oligonucleotide
ggtgggcagacccatctcctc

SEQ ID NO: 6120 - DNA, 21 bp, Artificial Sequence
  Description of Artificial Sequence: Synthetic oligonucleotide
ggtgggtagacccatctcctc

SEQ ID NO: 6121 - RNA, 21 nt, Artificial Sequence
  Description of Artificial Sequence: Synthetic oligonucleotide
ggagccguuucucugaaggcc

SEQ ID NO: 6122 - RNA, 21 nt, Artificial Sequence
  Description of Artificial Sequence: Synthetic oligonucleotide
ggagccgcuucucugaaggcc

SEQ ID NO: 6123 - RNA, 21 nt, Artificial Sequence
  Description of Artificial Sequence: Synthetic oligonucleotide
ggagcugcuucucugaaggcc

SEQ ID NO: 6124 - RNA, 21 nt, Artificial Sequence
  Description of Artificial Sequence: Synthetic oligonucleotide
ggagcuacuucucugaaggcc

SEQ ID NO: 6125 - RNA, 21 nt, Artificial Sequence
  Description of Artificial Sequence: Synthetic oligonucleotide
ggaguuacuucucugaaggcc

SEQ ID NO: 6126 - RNA, 21 nt, Artificial Sequence
  Description of Artificial Sequence: Synthetic oligonucleotide
ggagucacuucucugaaggcc

SEQ ID NO: 6127 - RNA, 21 nt, Artificial Sequence
  Description of Artificial Sequence: Synthetic oligonucleotide
ggaaucacuucucugaaggcc

SEQ ID NO: 6128 - RNA, 21 nt, Artificial Sequence
  Description of Artificial Sequence: Synthetic oligonucleotide
ggaaccacuucucugaaggcc

SEQ ID NO: 6129 - RNA, 20 nt, Artificial Sequence
  Description of Artificial Sequence: Synthetic oligonucleotide
gagcugcuucucugaaggcc

SEQ ID NO: 6130 - RNA, 20 nt, Artificial Sequence
  Description of Artificial Sequence: Synthetic oligonucleotide
gagcuacuucucugaaggcc

SEQ ID NO: 6131 - DNA, 23 bp, Homo sapiens
gtgggcggacccatctcctcagg

SEQ ID NO: 6132 - RNA, 21 nt, Artificial Sequence
  Description of Artificial Sequence: Synthetic oligonucleotide
gguggguagacccaucuccuc

SEQ ID NO: 6133 - RNA, 21 nt, Artificial Sequence
  Description of Artificial Sequence: Synthetic oligonucleotide
ggugggcagacccaucuccuc

SEQ ID NO: 6134 - DNA, 23 bp, Artificial Sequence
  Description of Artificial Sequence: Synthetic oligonucleotide
gtgggtggacccatctcctcagg

SEQ ID NO: 6135 - DNA, 39 bp, Artificial Sequence
  Description of Artificial Sequence: Synthetic oligonucleotide
agccagaggagatgggtccrcccacctgggctcctgagc

SEQ ID NO: 6136 - DNA, 39 bp, Artificial Sequence
  Description of Artificial Sequence: Synthetic oligonucleotide
agccagaggagatgggtccgcccacctgggctcctgagc
